(19) United States
(12) Patent Application Publication
(10) Pub. No.: US 2005/0277133 A1
(43) Pub. Date: Dec. 15, 2005

(54) RNA interference mediated treatment of polyglutamine (polyQ) repeat expansion diseases using short interfering nucleic acid (siNA)

(75) Inventor: James McSwiggen, Boulder, CO (US)

Correspondence Address: MCDONNELL BOEHNEN HULBERT & BERGHOFF LLP, 300 S. WACKER DRIVE, 32ND FLOOR, CHICAGO, IL, 60606, US

(73) Assignee: Sirna Therapeutics, Inc., Boulder, CO (US)

(21) Appl. No.: 11/063,415

(22) Filed: Feb. 22, 2005

Related U.S. Application Data
(63) Continuation-in-part of application No. 10/824,036, filed on Apr. 14, 2004.
Application No. 10/824,036 is a continuation-in-part of application No. 10/738,128, filed on Dec. 18, 2003.
(63) Continuation-in-part of application No. 10/923,536, filed on Aug. 20, 2004.
Application No. 10/923,536 is a continuation-in-part of application No. PCT/US04/16390, filed on May 24, 2004.
Application No. PCT/US04/16390 is a continuation-in-part of application No. 10/826,966, filed on Apr. 16, 2004.
Application No. 10/826,966 is a continuation-in-part of application No. 10/757,803, filed on Jan. 14, 2004.
Application No. 10/757,803 is a continuation-in-part of application No. 10/720,448, filed on Nov. 24, 2003.
Application No. 10/720,448 is a continuation-in-part of application No. 10/693,059, filed on Oct. 23, 2003.
Application No. 10/693,059 is a continuation-in-part of application No. 10/444,853, filed on May 23, 2003.
Application No. 10/444,853 is a continuation-in-part of application No. PCT/US03/05346, filed on Feb. 20, 2003.
Application No. 10/444,853 is a continuation-in-part of application No. PCT/US03/05028, filed on Feb. 20, 2003.
(63) Continuation-in-part of application No. PCT/US04/13456, filed on Apr. 30, 2004.
Application No. PCT/US04/13456 is a continuation-in-part of application No. 10/780,447, filed on Feb. 13, 2004.
Application No. 10/780,447 is a continuation-in-part of application No. 10/427,160, filed on Apr. 30, 2003.
Application No. 10/427,160 is a continuation-in-part of application No. PCT/US02/15876, filed on May 17, 2002.
(63) Continuation-in-part of application No. 10/727,780, filed on Dec. 3, 2003.
(60) Provisional application No. 60/358,580, filed on Feb. 20, 2002.
(60) Provisional application No. 60/358,580, filed on Feb. 20, 2002.
(60) Provisional application No. 60/363,124, filed on Mar. 11, 2002.
(60) Provisional application No. 60/363,124, filed on Mar. 11, 2002.
(60) Provisional application No. 60/386,782, filed on Jun. 6, 2002.
(60) Provisional application No. 60/386,782, filed on Jun. 6, 2002.
(60) Provisional application No. 60/406,784, filed on Aug. 29, 2002.
(60) Provisional application No. 60/406,784, filed on Aug. 29, 2002.
(60) Provisional application No. 60/408,378, filed on Sep. 5, 2002.
(60) Provisional application No. 60/408,378, filed on Sep. 5, 2002.
(60) Provisional application No. 60/409,293, filed on Sep. 9, 2002.
(60) Provisional application No. 60/409,293, filed on Sep. 9, 2002.
(60) Provisional application No. 60/440,129, filed on Jan. 15, 2003.
(60) Provisional application No. 60/440,129, filed on Jan. 15, 2003.
(60) Provisional application No. 60/292,217, filed on May 18, 2001.
(60) Provisional application No. 60/362,016, filed on Mar. 6, 2002.
(60) Provisional application No. 60/306,883, filed on Jul. 20, 2001.
(60) Provisional application No. 60/311,865, filed on Aug. 13, 2001.

(51) Int. Cl. C12Q 1/68; C07H 21/02

(52) U.S. Cl. 435/6; 514/44; 536/23.1

(57) ABSTRACT

The present invention concerns compounds, compositions, and methods for the study, diagnosis, and treatment of diseases and conditions associated with polyglutamine repeat (polyQ) allelic variants that respond to the modulation of gene expression and/or activity. The present invention also concerns compounds, compositions, and methods relating to diseases and conditions associated with polyglutamine repeat (polyQ) allelic variants that respond to the modulation of expression and/or activity of genes involved in polyQ repeat gene expression pathways or other cellular processes that mediate the maintenance or development of polyQ repeat diseases and conditions such as Huntington disease and related conditions such as progressive chorea, rigidity, dementia, and seizures, spinocerebellar ataxia, spinal and bulbar muscular dystrophy (SBMA), dentatorubropallidoluysian atrophy (DRPLA), and any other diseases or conditions that are related to or will respond to the levels of a repeat expansion (RE) protein in a cell or tissue, alone or in combination with other therapies. Specifically, the invention relates to small nucleic acid molecules, such as short interfering nucleic acid (siNA), short interfering RNA (siRNA), double-stranded RNA (dsRNA), micro-RNA (miRNA), and short hairpin RNA (shRNA) molecules capable of mediating RNA interference (RNAi) against the expression disease related genes or alleles having polyQ repeat sequences.

[0001] This application is a continuation-in-part of U.S. patent application Ser. No. 10/824,036, filed Apr. 14, 2004, which is continuation-in-part of U.S. patent application Ser. No. 10/783,128, filed Feb. 20, 2004. This patent application is also a continuation-in-part of U.S. patent application Ser. No. 10/923,536, filed Aug. 20, 2004, which is continuation-in-part of International Patent Application No. PCT/US04/16390, filed May 24, 2004, which is a continuation-in-part of U.S. patent application Ser. No. 10/826,966, filed Apr. 16, 2004, which is continuation-in-part of U.S. patent application Ser. No. 10/757,803, filed Jan. 14, 2004, which is a continuation-in-part of U.S. patent application Ser. No. 10/720,448, filed Nov. 24, 2003, which is a continuation-in-part of U.S. patent application Ser. No. 10/693,059, filed Oct. 23, 2003, which is a continuation-in-part of U.S. patent application Ser. No. 10/444,853, filed May 23, 2003, which is a continuation-in-part of International Patent Application No. PCT/US03/05346, filed Feb. 20, 2003, and a continuation-in-part of International Patent Application No. PCT/US03/05028, filed Feb. 20, 2003, both of which claim the benefit of U.S. Provisional Application No. 60/358,580 filed Feb. 20, 2002, U.S. Provisional Application No. 60/363,124 filed Mar. 11, 2002, U.S. Provisional Application No. 60/386,782 filed Jun. 6, 2002, U.S. Provisional Application No. 60/406,784 filed Aug. 29, 2002, U.S. Provisional Application No. 60/408,378 filed Sep. 5, 2002, U.S. Provisional Application No. 60/409,293 filed Sep. 9, 2002, and U.S. Provisional Application No. 60/440,129 filed Jan. 15, 2003. This application is also a continuation-in-part of International Patent Application No. PCT/US04/13456, filed Apr. 30, 2004, which is a continuation-in-part of patent application Ser. No. 10/780,447, filed Feb. 13, 2004, which is a continuation-in-part of U.S. patent application Ser. No. 10/427,160, filed Apr. 30, 2003, which is a continuation-in-part of International Patent Application No. PCT/US02/15876 filed May 17, 2002, which claims the benefit of U.S. Provisional Application No. 60/362,016, filed Mar. 6, 2002, U.S. Provisional Application No. 60/292,217, filed May 18, 2001, U.S. Provisional Application No. 60/306,883 filed Jul. 20, 2001, and U.S. Provisional Application No. 60/311,865 filed Aug. 13, 2001. This application is also a continuation-in-part of U.S. patent application Ser. No. 10/727,780 filed Dec. 3, 2003. This application also claims the benefit of U.S. Provisional Application No. 60/543,480 filed Feb. 10, 2004. The instant application claims the benefit of all the listed applications, which are hereby incorporated by reference herein in their entireties, including the drawings.

### FIELD OF THE INVENTION

[0002] The present invention concerns compounds, compositions, and methods for the study, diagnosis, and treatment of diseases and conditions associated with polyglutamine repeat (polyQ) allelic variants that respond to the modulation of gene expression and/or activity. The present invention also concerns compounds, compositions, and methods relating to diseases and conditions associated with polyglutamine repeat (polyQ) allelic variants that respond to the modulation of expression and/or activity of genes involved in polyQ repeat gene expression pathways or other cellular processes that mediate the maintenance or development of polyQ repeat diseases and conditions. Specifically, the invention relates to small nucleic acid molecules, such as short interfering nucleic acid (siNA), short interfering RNA (siRNA), double-stranded RNA (dsRNA), micro-RNA (miRNA), and short hairpin RNA (shRNA) molecules capable of mediating RNA interference (RNAi) against the expression disease related genes or alleles having polyQ repeat sequences.

### BACKGROUND OF THE INVENTION

[0003] The following is a discussion of relevant art pertaining to RNAi. The discussion is provided only for understanding of the invention that follows. The summary is not an admission that any of the work described below is prior art to the claimed invention.

[0004] RNA interference refers to the process of sequence-specific post-transcriptional gene silencing in animals mediated by short interfering RNAs (siRNAs) (Zamore et al., 2000, Cell, 101, 25-33; Fire et al., 1998, Nature, 391, 806; Hamilton et al., 1999, Science, 286, 950-951; Lin et al., 1999, Nature, 402, 128-129; Sharp, 1999, Genes & Dev., 13:139-141; and Strauss, 1999, Science, 286, 886). The corresponding process in plants (Heifetz et al., International PCT Publication No. WO 99/61631) is commonly referred to as post-transcriptional gene silencing or RNA silencing and is also referred to as quelling in fungi. The process of post-transcriptional gene silencing is thought to be an evolutionarily-conserved cellular defense mechanism used to prevent the expression of foreign genes and is commonly shared by diverse flora and phyla (Fire et al., 1999, Trends Genet., 15, 358). Such protection from foreign gene expression may have evolved in response to the production of double-stranded RNAs (dsRNAs) derived from viral infection or from the random integration of transposon elements into a host genome via a cellular response that specifically destroys homologous single-stranded RNA or viral genomic RNA. The presence of dsRNA in cells triggers the RNAi response through a mechanism that has yet to be fully characterized. This mechanism appears to be different from other known mechanisms involving double stranded RNA-specific ribonucleases, such as the interferon response that results from dsRNA-mediated activation of protein kinase PKR and 2′,5′-oligoadenylate synthetase resulting in non-specific cleavage of mRNA by ribonuclease L (see for example U.S. Pat. Nos. 6,107,094; 5,898,031; Clemens et al., 1997, J. Interferon & Cytokine Res., 17, 503-524; Adah et al., 2001, Curr. Med. Chem., 8, 1189).

[0005] The presence of long dsRNAs in cells stimulates the activity of a ribonuclease III enzyme referred to as dicer (Bass, 2000, Cell, 101, 235; Zamore et al., 2000, Cell, 101, 25-33; Hammond et al., 2000, Nature, 404, 293). Dicer is involved in the processing of the dsRNA into short pieces of dsRNA known as short interfering RNAs (siRNAs) (Zamore et al., 2000, Cell, 101, 25-33; Bass, 2000, Cell, 101, 235; Berstein et al., 2001, Nature, 409, 363). Short interfering RNAs derived from dicer activity are typically about 21 to about 23 nucleotides in length and comprise about 19 base pair duplexes (Zamore et al., 2000, Cell, 101, 25-33; Elbashir et al., 2001, Genes Dev., 15, 188). Dicer has also been implicated in the excision of 21- and 22-nucleotide small temporal RNAs (stRNAs) from precursor RNA of conserved structure that are implicated in translational control (Hutvagner et al., 2001, Science, 293, 834). The RNAi response also features an endonuclease complex, commonly referred to as an RNA-induced silencing complex (RISC), which mediates cleavage of single-stranded RNA having sequence complementary to the antisense strand of the siRNA duplex. Cleavage of the target RNA takes place in the middle of the region complementary to the antisense strand of the siRNA duplex (Elbashir et al., 2001, Genes Dev., 15, 188).

[0006] RNAi has been studied in a variety of systems. Fire et al., 1998, Nature, 391, 806, were the first to observe RNAi in C. elegans. Bahramian and Zarbl, 1999, Molecular and Cellular Biology, 19, 274-283 and Wianny and Goetz, 1999, Nature Cell Biol., 2, 70, describe RNAi mediated by dsRNA in mammalian systems. Hammond et al., 2000, Nature, 404, 293, describe RNAi in Drosophila cells transfected with dsRNA. Elbashir et al., 2001, Nature, 411, 494 and Tuschl et al., International PCT Publication No. WO 01/75164, describe RNAi induced by introduction of duplexes of synthetic 21-nucleotide RNAs in cultured mammalian cells including human embryonic kidney and HeLa cells. Recent work in Drosophila embryonic lysates (Elbashir et al., 2001, EMBO J., 20, 6877 and Tuschl et al., International PCT Publication No. WO 01/75164) has revealed certain requirements for siRNA length, structure, chemical composition, and sequence that are essential to mediate efficient RNAi activity. These studies have shown that 21-nucleotide siRNA duplexes are most active when containing 3′-terminal dinucleotide overhangs. Furthermore, complete substitution of one or both siRNA strands with 2′-deoxy (2′-H) or 2′-O-methyl nucleotides abolishes RNAi activity, whereas substitution of the 3′-terminal siRNA overhang nucleotides with 2′-deoxy nucleotides (2′-H) was shown to be tolerated. Single mismatch sequences in the center of the siRNA duplex were also shown to abolish RNAi activity. In addition, these studies also indicate that the position of the cleavage site in the target RNA is defined by the 5′-end of the siRNA guide sequence rather than the 3′-end of the guide sequence (Elbashir et al., 2001, EMBO J., 20, 6877). Other studies have indicated that a 5′-phosphate on the target-complementary strand of a siRNA duplex is required for siRNA activity and that ATP is utilized to maintain the 5′-phosphate moiety on the siRNA (Nykanen et al., 2001, Cell, 107, 309).

[0007] Studies have shown that replacing the 3′-terminal nucleotide overhanging segments of a 21-mer siRNA duplex having two-nucleotide 3′-overhangs with deoxyribonucleotides does not have an adverse effect on RNAi activity. Replacing up to four nucleotides on each end of the siRNA with deoxyribonucleotides has been reported to be well tolerated, whereas complete substitution with deoxyribonucleotides results in no RNAi activity (Elbashir et al., 2001, EMBO J., 20, 6877 and Tuschl et al., International PCT Publication No. WO 01/75164). In addition, Elbashir et al., supra, also report that substitution of siRNA with 2′-O-methyl nucleotides completely abolishes RNAi activity. Li et al., International PCT Publication No. WO 00/44914, and Beach et al., International PCT Publication No. WO 01/68836 preliminarily suggest that siRNA may include modifications to either the phosphate-sugar backbone or the nucleoside to include at least one of a nitrogen or sulfur heteroatom, however, neither application postulates to what extent such modifications would be tolerated in siRNA molecules, nor provides any further guidance or examples of such modified siRNA. Kreutzer et al., Canadian Patent Application No. 2,359,180, also describe certain chemical modifications for use in dsRNA constructs in order to counteract activation of double-stranded RNA-dependent protein kinase PKR, specifically 2′-amino or 2′-O-methyl nucleotides, and nucleotides containing a 2′-O or 4′-C methylene bridge. However, Kreutzer et al. similarly fails to provide examples or guidance as to what extent these modifications would be tolerated in dsRNA molecules.

[0008] Parrish et al., 2000, Molecular Cell, 6, 1077-1087, tested certain chemical modifications targeting the unc-22 gene in C. elegans using long (>25 nt) siRNA transcripts. The authors describe the introduction of thiophosphate residues into these siRNA transcripts by incorporating thiophosphate nucleotide analogs with T7 and T3 RNA polymerase and observed that RNAs with two phosphorothioate modified bases also had substantial decreases in effectiveness as RNAi. Further, Parrish et al. reported that phosphorothioate modification of more than two residues greatly destabilized the RNAs in vitro such that interference activities could not be assayed. Id. at 1081. The authors also tested certain modifications at the 2′-position of the nucleotide sugar in the long siRNA transcripts and found that substituting deoxynucleotides for ribonucleotides produced a substantial decrease in interference activity, especially in the case of Uridine to Thymidine and/or Cytidine to deoxy-Cytidine substitutions. Id. In addition, the authors tested certain base modifications, including substituting, in sense and antisense strands of the siRNA, 4-thiouracil, 5-bromouracil, 5-iodouracil, and 3-(aminoallyl)uracil for uracil, and inosine for guanosine. Whereas 4-thiouracil and 5-bromouracil substitution appeared to be tolerated, Parrish reported that inosine produced a substantial decrease in interference activity when incorporated in either strand. Parrish also reported that incorporation of 5-iodouracil and 3-(aminoallyl)uracil in the antisense strand resulted in a substantial decrease in RNAi activity as well.

[0009] The use of longer dsRNA has been described. For example, Beach et al., International PCT Publication No. WO 01/68836, describes specific methods for attenuating gene expression using endogenously-derived dsRNA. Tuschl et al., International PCT Publication No. WO 01/75164, describe a Drosophila in vitro RNAi system and the use of specific siRNA molecules for certain functional genomic and certain therapeutic applications; although Tuschl, 2001, Chem. Biochem., 2, 239-245, doubts that RNAi can be used to cure genetic diseases or viral infection due to the danger of activating interferon response. Li et al., International PCT Publication No. WO 00/44914, describe the use of specific long (141 bp-488 bp) enzymatically synthesized or vector expressed dsRNAs for attenuating the expression of certain target genes. Zernicka-Goetz et al., International PCT Publication No. WO 01/36646, describe certain methods for inhibiting the expression of particular genes in mammalian cells using certain long (550 bp-714 bp), enzymatically synthesized or vector expressed dsRNA molecules. Fire et al., International PCT Publication No. WO 99/32619, describe particular methods for introducing certain long dsRNA molecules into cells for use in inhibiting gene expression in nematodes. Plaetinck et al., International PCT Publication No. WO 00/01846, describe certain methods for identifying specific genes responsible for conferring a particular phenotype in a cell using specific long dsRNA molecules. Mello et al., International PCT Publication No. WO 01/29058, describe the identification of specific genes involved in dsRNA-mediated RNAi. Pachuck et al., International PCT Publication No. WO 00/63364, describe certain long (at least 200 nucleotide) dsRNA constructs. Deschamps Depaillette et al., International PCT Publication No. WO 99/07409, describe specific compositions consisting of particular dsRNA molecules combined with certain anti-viral agents. Waterhouse et al., International PCT Publication No. 99/53050 and 1998, PNAS, 95, 13959-13964, describe certain methods for decreasing the phenotypic expression of a nucleic acid in plant cells using certain dsRNAs. Driscoll et al., International PCT Publication No. WO 01/49844, describe specific DNA expression constructs for use in facilitating gene silencing in targeted organisms.

[0010] Others have reported on various RNAi and gene-silencing systems. For example, Parrish et al., 2000, Molecular Cell, 6, 1077-1087, describe specific chemically-modified dsRNA constructs targeting the unc-22 gene of C. elegans. Grossniklaus, International PCT Publication No. WO 01/38551, describes certain methods for regulating polycomb gene expression in plants using certain dsRNAs. Churikov et al., International PCT Publication No. WO 01/42443, describe certain methods for modifying genetic characteristics of an organism using certain dsRNAs. Cogoni et al, International PCT Publication No. WO 01/53475, describe certain methods for isolating a Neurospora silencing gene and uses thereof. Reed et al., International PCT Publication No. WO 01/68836, describe certain methods for gene silencing in plants. Honer et al., International PCT Publication No. WO 01/70944, describe certain methods of drug screening using transgenic nematodes as Parkinson's Disease models using certain dsRNAs. Deak et al., International PCT Publication No. WO 01/72774, describe certain Drosophila-derived gene products that may be related to RNAi in Drosophila. Arndt et al., International PCT Publication No. WO 01/92513 describe certain methods for mediating gene suppression by using factors that enhance RNAi. Tuschl et al., International PCT Publication No. WO 02/44321, describe certain synthetic siRNA constructs. Pachuk et al., International PCT Publication No. WO 00/63364, and Satishchandran et al., International PCT Publication No. WO 01/04313, describe certain methods and compositions for inhibiting the function of certain polynucleotide sequences using certain long (over 250 bp), vector expressed dsRNAs. Echeverri et al., International PCT Publication No. WO 02/38805, describe certain C. elegans genes identified via RNAi. Kreutzer et al., International PCT Publications Nos. WO 02/055692, WO 02/055693, and EP 1144623 B1 describes certain methods for inhibiting gene expression using dsRNA. Graham et al., International PCT Publications Nos. WO 99/49029 and WO 01/70949, and AU 4037501 describe certain vector expressed siRNA molecules. Fire et al., U.S. Pat. No. 6,506,559, describe certain methods for inhibiting gene expression in vitro using certain long dsRNA (299 bp-1033 bp) constructs that mediate RNAi. Martinez et al., 2002, Cell, 110, 563-574, describe certain single stranded siRNA constructs, including certain 5′-phosphorylated single stranded siRNAs that mediate RNA interference in Hela cells. Harborth et al., 2003, Antisense & Nucleic Acid Drug Development, 13, 83-105, describe certain chemically and structurally modified siRNA molecules. Chiu and Rana, 2003, RNA, 9, 1034-1048, describe certain chemically and structurally modified siRNA molecules. Woolf et al., International PCT Publication Nos. WO 03/064626 and WO 03/064625 describe certain chemically modified dsRNA constructs. Miller et al., 2003, PNAS, 100, 7195-7200, describe certain transcribed siRNA molecules targeting certain allele specific RNA transcripts associated with trinucleotide reapeat/polyQ nuerodegenerative disorders such as Machado Joseph Disease, spinocerebellar ataxia, and frontotemporaral dementia. Davidson et al., WO 04/013280, describe certain siRNA molecules targeting certain allele specific RNA transcripts including certain polyQ repeat gene transcripts associated with certain neurodegenerative diseases. Xia et al., 2004, Nature Medicine, 10, 816-820, describe RNAi suppressesion of polyglutamine-induced neurodegeneration in a model of spinocerebellar ataxia.

### SUMMARY OF THE INVENTION

[0011] This invention relates to compounds, compositions, and methods useful for modulating the expression of repeat expansion genes associated with the maintenance or development of neurodegenerative disease, for example polyglutamine repeat expansion genes and variants thereof, including single nucleotide polymorphism (SNP) variants associated with disease related trinucleotide repeat expansion genes, using short interfering nucleic acid (siNA) molecules. This invention also relates to compounds, compositions, and methods useful for modulating the expression and activity of repeat expansion genes, or other genes involved in pathways of repeat expansion genes expression and/or activity by RNA interference (RNAi) using small nucleic acid molecules. In particular, the instant invention features small nucleic acid molecules, such as short interfering nucleic acid (siNA), short interfering RNA (siRNA), double-stranded RNA (dsRNA), micro-RNA (miRNA), and short hairpin RNA (shRNA) molecules and methods used to modulate the expression repeat expansion genes.

[0012] A siNA of the invention can be unmodified or chemically-modified. A siNA of the instant invention can be chemically synthesized, expressed from a vector or enzymatically synthesized. The instant invention also features various chemically-modified synthetic short interfering nucleic acid (siNA) molecules capable of modulating repeat expansion (RE) gene expression or activity in cells by RNA interference (RNAi). The use of chemically-modified siNA improves various properties of native siNA molecules through increased resistance to nuclease degradation in vivo and/or through improved cellular uptake. Further, contrary to earlier published studies, siNA having multiple chemical modifications retains its RNAi activity. The siNA molecules of the instant invention provide useful reagents and methods for a variety of therapeutic, cosmetic, veterinary, diagnostic, target validation, genomic discovery, genetic engineering, and pharmacogenomic applications.

[0013] In one embodiment, the invention features one or more siNA molecules and methods that independently or in combination modulate the expression of repeat expansion genes encoding proteins, such as proteins comprising polyglutamine repeat expansions, associated with the maintenance and/or development of neurodegenerative diseases, such as genes encoding sequences comprising those sequences referred to by GenBank Accession Nos. shown in Table I, referred to herein generally as repeat expansion (RE) genes. The description below of the various aspects and embodiments of the invention is provided with reference to exemplary Huntingtin gene referred to herein as HD. However, the various aspects and embodiments are also directed to other repeat expansion genes, such spinocerebellar ataxia genes including SCA1, SCA2, SCA3, SCA5, SCA7, SCA12, and SCA17, spinal and bulbar muscular atrophy genes such as androgen receptor (AR) locus Xq11-q12 genes, and dentatorubropallidoluysian atrophy genes such as DRPLA, as well as other mutant gene variants having trinucleotide repeat expansions and SNPs associated with such trinucleotide repeat expansions. The various aspects and embodiments are also directed to other genes that are involved in RE mediated pathways of signal transduction or gene expression that are involved in the progression, development, and/or maintenance of disease (e.g., Huntington disease, spinocerebellar ataxia, spinal and bulbar muscular dystrophy, and dentatorubropallidoluysian atrophy), including enzymes involved in processing RE proteins. These additional genes can be analyzed for target sites using the methods described for HD genes herein. Thus, the modulation of other genes and the effects of such modulation of the other genes can be performed, determined, and measured as described herein.

[0014] In one embodiment, the invention features a double-stranded short interfering nucleic acid (siNA) molecule that down-regulates expression of a repeat expansion (RE) gene, wherein said siNA molecule comprises about 15 to about 28 base pairs.

[0015] In one embodiment, the invention features a double stranded short interfering nucleic acid (siNA) molecule that directs cleavage of a repeat expansion (RE) RNA via RNA interference (RNAi), wherein the double stranded siNA molecule comprises a first and a second strand, each strand of the siNA molecule is about 18 to about 28 nucleotides in length, the first strand of the siNA molecule comprises nucleotide sequence having sufficient complementarity to the repeat expansion (RE) RNA for the siNA molecule to direct cleavage of the repeat expansion (RE) RNA via RNA interference, and the second strand of said siNA molecule comprises nucleotide sequence that is complementary to the first strand. The repeat expansion (RE) RNA can be derived from a gene, for example, huntingtin, SCA1, SCA2, SCA3, SCA6, SCA7, SCA12, SCA17, SBMA, or DRPLA (see for example Table I), including both mutant and wild-type alleles thereof.

[0016] In one embodiment, the invention features a double stranded short interfering nucleic acid (siNA) molecule that directs cleavage of a repeat expansion (RE) RNA via RNA interference (RNAi), wherein the double stranded siNA molecule comprises a first and a second strand, each strand of the siNA molecule is about 18 to about 23 nucleotides in length, the first strand of the siNA molecule comprises nucleotide sequence having sufficient complementarity to the repeat expansion (RE) RNA for the siNA molecule to direct cleavage of the repeat expansion (RE) RNA via RNA interference, and the second strand of said siNA molecule comprises nucleotide sequence that is complementary to the first strand. The repeat expansion (RE) RNA can be derived from a gene, for example, huntingtin, SCA1, SCA2, SCA3, SCA6, SCA7, SCA12, SCA17, SBMA, or DRPLA (see for example Table I), including both mutant and wild-type alleles thereof.

[0017] In one embodiment, the invention features a chemically synthesized double stranded short interfering nucleic acid (siNA) molecule that directs cleavage of a repeat expansion (RE) RNA via RNA interference (RNAi), wherein each strand of the siNA molecule is about 18 to about 28 nucleotides in length; and one strand of the siNA molecule comprises nucleotide sequence having sufficient complementarity to the repeat expansion (RE) RNA for the siNA molecule to direct cleavage of the repeat expansion (RE) RNA via RNA interference. The repeat expansion (RE) RNA can be derived from a gene, for example, huntingtin, SCA1, SCA2, SCA3, SCA6, SCA7, SCA12, SCA17, SBMA, or DRPLA (see for example Table I), including both mutant and wild-type alleles thereof.

[0018] In one embodiment, the invention features a chemically synthesized double stranded short interfering nucleic acid (siNA) molecule that directs cleavage of a repeat expansion (RE) RNA via RNA interference (RNAi), wherein each strand of the siNA molecule is about 18 to about 23 nucleotides in length; and one strand of the siNA molecule comprises nucleotide sequence having sufficient complementarity to the repeat expansion (RE) RNA for the siNA molecule to direct cleavage of the repeat expansion (RE) RNA via RNA interference. The repeat expansion (RE) RNA can be derived from a gene, for example, huntingtin, SCA1, SCA2, SCA3, SCA6, SCA7, SCA12, SCA17, SBMA, or DRPLA (see for example Table 1), including both mutant and wild-type alleles thereof.

[0019] In one embodiment, the invention features a siNA molecule that down-regulates expression of a repeat expansion (RE) gene or that directs cleavage of a repeat expansion (RE) RNA, for example, wherein the repeat expansion (RE) gene or RNA comprises repeat expansion (RE) encoding sequence. In one embodiment, the invention features a siNA molecule that down-regulates expression of a repeat expansion (RE) gene or that directs cleavage of a repeat expansion (RE) RNA, for example, wherein the repeat expansion (RE) gene or RNA comprises repeat expansion (RE) non-coding sequence or regulatory elements involved in repeat expansion (RE) gene expression.

[0020] In one embodiment, a siNA of the invention is used to inhibit the expression of repeat expansion (RE) genes or a repeat expansion (RE) gene family, wherein the genes or gene family sequences share sequence homology. Such homologous sequences can be identified as is known in the art, for example using sequence alignments. siNA molecules can be designed to target such homologous sequences, for example using perfectly complementary sequences or by incorporating non-canonical base pairs, for example mismatches and/or wobble base pairs, that can provide additional target sequences. In instances where mismatches are identified, non-canonical base pairs (for example, mismatches and/or wobble bases) can be used to generate siNA molecules that target more than one gene sequence. In a non-limiting example, non-canonical base pairs such as UU and CC base pairs are used to generate siNA molecules that are capable of targeting sequences for differing repeat expansion (RE) targets that share sequence homology. As such, one advantage of using siNAs of the invention is that a single siNA can be designed to include nucleic acid sequence that is complementary to the nucleotide sequence that is conserved between the homologous genes. In this approach, a single siNA can be used to inhibit expression of more than one gene instead of using more than one siNA molecule to target the different genes.

[0021] In one embodiment, the invention features a siNA molecule having RNAi activity against repeat expansion (RE) RNA, wherein the siNA molecule comprises a sequence complementary to any RNA having repeat expansion (RE) encoding sequence, such as those sequences having GenBank Accession Nos. shown in Table I. In another embodiment, the invention features a siNA molecule having RNAi activity against repeat expansion (RE) RNA, wherein the siNA molecule comprises a sequence complementary to an RNA having variant repeat expansion (RE) encoding sequence, for example other mutant repeat expansion (RE) genes not shown in Table I but known in the art to be associated with the maintenance and/or development of Huntington disease, spinocerebellar ataxia, spinal and bulbar muscular dystrophy, and dentatorubropallidoluysian atrophy. Chemical modifications as shown in Tables III and IV or otherwise described herein can be applied to any siNA construct of the invention. In another embodiment, a siNA molecule of the invention includes a nucleotide sequence that can interact with nucleotide sequence of a repeat expansion (RE) gene and thereby mediate silencing of repeat expansion (RE) gene expression, for example, wherein the siNA mediates regulation of repeat expansion (RE) gene expression by cellular processes that modulate the chromatin structure or methylation patterns of the repeat expansion (RE) gene and prevent transcription of the repeat expansion (RE) gene.

[0022] In one embodiment, siNA molecules of the invention are used to down regulate or inhibit the expression of proteins arising from repeat expansion (RE) haplotype polymorphisms that are associated with a trait, disease or condition such as Huntington disease, spinocerebellar ataxia, spinal and bulbar muscular dystrophy, and dentatorubropallidoluysian atrophy in a subject or organism. Analysis of genes, or protein or RNA levels can be used to identify subjects with such repeat expansion genes and/or polymorphisms or those subjects who are at risk of developing traits, conditions, or diseases described herein, such as Huntington disease. These subjects are amenable to treatment, for example, treatment with siNA molecules of the invention and any other composition useful in treating diseases related to repeat expansion (RE) gene expression. As such, analysis of repeat expansion (RE) protein or RNA levels can be used to determine treatment type and the course of therapy in treating a subject. Monitoring of repeat expansion (RE) protein or RNA levels can be used to predict treatment outcome and to determine the efficacy of compounds and compositions that modulate the level and/or activity of certain repeat expansion (RE) proteins associated with a trait, condition, or disease.

[0023] In one embodiment, siNA molecules of the invention are used to down regulate or inhibit the expression of mutant repeat expansion (RE) proteins that are neurotoxic, such as mutant repeat expansion (RE) proteins resulting from polyglutamine repeat expansions and fragments or portions of such mutant repeat expansion (RE) proteins that are processed by cellular enzymes resulting in neurotoxic proteins or peptides.

[0024] In one embodiment of the invention a siNA molecule comprises an antisense strand comprising a nucleotide sequence that is complementary to a nucleotide sequence or a portion thereof encoding a repeat expansion (RE) protein. The siNA further comprises a sense strand, wherein said sense strand comprises a nucleotide sequence of a repeat expansion (RE) gene or a portion thereof.

[0025] In another embodiment, a siNA molecule comprises an antisense region comprising a nucleotide sequence that is complementary to a nucleotide sequence encoding a repeat expansion (RE) protein or a portion thereof. The siNA molecule further comprises a sense region, wherein said sense region comprises a nucleotide sequence of a repeat expansion (RE) gene or a portion thereof.

[0026] In another embodiment, the invention features a siNA molecule comprising nucleotide sequence, for example, nucleotide sequence in the antisense region of the siNA molecule that is complementary to a nucleotide sequence or portion of sequence of a repeat expansion (RE) gene. In another embodiment, the invention features a siNA molecule comprising a region, for example, the antisense region of the siNA construct, complementary to a sequence comprising a repeat expansion (RE) gene sequence or a portion thereof.

[0027] In one embodiment, the antisense region of siNA constructs comprises a sequence complementary to sequence having any of target SEQ ID NOs. shown in Tables II and III. In one embodiment, the antisense region of siNA constructs of the invention comprises sequence having any of antisense (lower) SEQ ID NOs. in Tables II and III and FIGS. 4 and 5. In another embodiment, the sense region of siNA constructs of the invention comprises sequence having any of sense (upper) SEQ ID NOs. in Tables II and III and FIGS. 4 and 5.

[0028] In one embodiment, a siNA molecule of the invention comprises any of SEQ ID NOs. 1-3575. The sequences shown in SEQ ID NOs: 1-3575 are not limiting. A siNA molecule of the invention can comprise any contiguous repeat expansion (RE) sequence (e.g., about 15 to about 25 or more, or about 15, 16, 17, 18, 19, 20, 21, 22, 23, 24, or 25 or more contiguous repeat expansion (RE) nucleotides).

[0029] In yet another embodiment, the invention features a siNA molecule comprising a sequence, for example, the antisense sequence of the siNA construct, complementary to a sequence or portion of sequence comprising sequence represented by GenBank Accession Nos. shown in Table I. Chemical modifications in Tables III and IV and described herein can be applied to any siNA construct of the invention.

[0030] In one embodiment of the invention a siNA molecule comprises an antisense strand having about 15 to about 30 (e.g., about 15, 16, 17, 18, 19, 20, 21, 22, 23, 24, 25, 26, 27, 28, 29, or 30) nucleotides, wherein the antisense strand is complementary to a RNA sequence or a portion thereof encoding repeat expansion (RE), and wherein said siNA further comprises a sense strand having about 15 to about 30 (e.g., about 15, 16, 17, 18, 19, 20, 21, 22, 23, 24, 25, 26, 27, 28, 29, or 30) nucleotides, and wherein said sense strand and said antisense strand are distinct nucleotide sequences where at least about 15 nucleotides in each strand are complementary to the other strand.

[0031] In another embodiment of the invention a siNA molecule of the invention comprises an antisense region having about 15 to about 30 (e.g., about 15, 16, 17, 18, 19, 20, 21, 22, 23, 24, 25, 26, 27, 28, 29, or 30) nucleotides, wherein the antisense region is complementary to a RNA sequence encoding repeat expansion (RE), and wherein said siNA further comprises a sense region having about 15 to about 30 (e.g., about 15, 16, 17, 18, 19, 20, 21, 22, 23, 24, 25, 26, 27, 28, 29, or 30) nucleotides, wherein said sense region and said antisense region are comprised in a linear molecule where the sense region comprises at least about 15 nucleotides that are complementary to the antisense region.

[0032] In one embodiment, a siNA molecule of the invention has RNAi activity that modulates expression of RNA encoded by a repeat expansion (RE) gene. Because repeat expansion (RE) genes can share some degree of sequence homology with each other, siNA molecules can be designed to target a class of repeat expansion (RE) genes or alternately specific repeat expansion (RE) genes (e.g., polymorphic variants) by selecting sequences that are either shared amongst different repeat expansion (RE) targets or alternatively that are unique for a specific repeat expansion (RE) target. Therefore, in one embodiment, the siNA molecule can be designed to target conserved regions of repeat expansion (RE) RNA sequences having homology among several repeat expansion (RE) gene variants so as to target a class of repeat expansion (RE) genes with one siNA molecule (e.g., RE variants having differing trinucleotide repeat expansions). Accordingly, in one embodiment, the siNA molecule of the invention modulates the expression of one or both alleles of a repeat expansion (RE) associated gene (e.g., both mutant and wildtype HD alleles) in a subject. In another embodiment, the siNA molecule can be designed to target a sequence that is unique to a specific RE RNA sequence (e.g., a single repeat expansion allele or repeat expansion SNP) due to the high degree of specificity that the siNA molecule requires to mediate RNAi activity. As such, in one embodiment, a siNA molecule of the invention is used to target only the mutant repeat expansion (RE) allele (e.g., mutant HD allele) in a subject or organism.

[0033] In one embodiment, nucleic acid molecules of the invention that act as mediators of the RNA interference gene silencing response are double-stranded nucleic acid molecules. In another embodiment, the siNA molecules of the invention consist of duplex nucleic acid molecules containing about 15 to about 30 base pairs between oligonucleotides comprising about 15 to about 30 (e.g., about 15, 16, 17, 18, 19, 20, 21, 22, 23, 24, 25, 26, 27, 28, 29, or 30) nucleotides. In yet another embodiment, siNA molecules of the invention comprise duplex nucleic acid molecules with overhanging ends of about 1 to about 3 (e.g., about 1, 2, or 3) nucleotides, for example, about 21-nucleotide duplexes with about 19 base pairs and 3′-terminal mononucleotide, dinucleotide, or trinucleotide overhangs. In yet another embodiment, siNA molecules of the invention comprise duplex nucleic acid molecules with blunt ends, where both ends are blunt, or alternatively, where one of the ends is blunt.

[0034] In one embodiment, the invention features one or more chemically-modified siNA constructs having specificity for repeat expansion (RE) expressing nucleic acid molecules, such as RNA encoding a repeat expansion (RE) protein or non-coding RNA associated with the expression of repeat expansion (RE) genes. In one embodiment, the invention features a RNA based siNA molecule (e.g., a siNA comprising 2′-OH nucleotides) having specificity for repeat expansion (RE) expressing nucleic acid molecules that includes one or more chemical modifications described herein. Non-limiting examples of such chemical modifications include without limitation phosphorothioate internucleotide linkages, 2′-deoxyribonucleotides, 2′-O-methyl ribonucleotides, 2′-deoxy-2′-fluoro ribonucleotides, 4′-thio ribonucleotides, 2′-O-trifluoromethyl nucleotides, 2′-O-ethyl-trifluoromethoxy nucleotides, 2′-O-difluoromethoxy-ethoxy nucleotides (see for example U.S. Ser. No. 10/981,966 filed Nov. 5, 2004, incorporated by reference herein), “universal base” nucleotides, “acyclic” nucleotides, 5-C-methyl nucleotides, and terminal glyceryl and/or inverted deoxy abasic residue incorporation. These chemical modifications, when used in various siNA constructs, (e.g., RNA based siNA constructs), are shown to preserve RNAi activity in cells while at the same time, dramatically increasing the serum stability of these compounds. Furthermore, contrary to the data published by Parrish et al., supra, applicant demonstrates that multiple (greater than one) phosphorothioate substitutions are well-tolerated and confer substantial increases in serum stability for modified siNA constructs.

[0035] In one embodiment, a siNA molecule of the invention comprises modified nucleotides while maintaining the ability to mediate RNAi. The modified nucleotides can be used to improve in vitro or in vivo characteristics such as stability, activity, toxicity, immune response, and/or bioavailability. For example, a siNA molecule of the invention can comprise modified nucleotides as a percentage of the total number of nucleotides present in the siNA molecule. As such, a siNA molecule of the invention can generally comprise about 5% to about 100% modified nucleotides (e.g., about 5%, 10%, 15%, 20%, 25%, 30%, 35%, 40%, 45%, 50%, 55%, 60%, 65%, 70%, 75%, 80%, 85%, 90%, 95% or 100% modified nucleotides). The actual percentage of modified nucleotides present in a given siNA molecule will depend on the total number of nucleotides present in the siNA. If the siNA molecule is single stranded, the percent modification can be based upon the total number of nucleotides present in the single stranded siNA molecules. Likewise, if the siNA molecule is double stranded, the percent modification can be based upon the total number of nucleotides present in the sense strand, antisense strand, or both the sense and antisense strands.

[0036] A siNA molecule of the invention can comprise modified nucleotides at various locations within the siNA molecule. In one embodiment, a double stranded siNA molecule of the invention comprises modified nucleotides at internal base paired positions within the siNA duplex. For example, internal positions can comprise positions from about 3 to about 19 nucleotides from the 5′-end of either sense or antisense strand or region of a 21 nucleotide siNA duplex having 19 base pairs and two nucleotide 3′-overhangs. In another embodiment, a double stranded siNA molecule of the invention comprises modified nucleotides at non-base paired or overhang regions of the siNA molecule. For example, overhang positions can comprise positions from about 20 to about 21 nucleotides from the 5′-end of either sense or antisense strand or region of a 21 nucleotide siNA duplex having 19 base pairs and two nucleotide 3′-overhangs. In another embodiment, a double stranded siNA molecule of the invention comprises modified nucleotides at terminal positions of the siNA molecule. For example, such terminal regions include the 3′-position, 5′-position, for both 3′ and 5′-positions of the sense and/or antisense strand or region of the siNA molecule. In another embodiment, a double stranded siNA molecule of the invention comprises modified nucleotides at base-paired or internal positions, non-base paired or overhang regions, and/or terminal regions, or any combination thereof.

[0037] One aspect of the invention features a double-stranded short interfering nucleic acid (siNA) molecule that down-regulates expression of a repeat expansion (RE) gene or that directs cleavage of a repeat expansion (RE) RNA. In one embodiment, the double stranded siNA molecule comprises one or more chemical modifications and each strand of the double-stranded siNA is about 21 nucleotides long. In one embodiment, the double-stranded siNA molecule does not contain any ribonucleotides. In another embodiment, the double-stranded siNA molecule comprises one or more ribonucleotides. In one embodiment, each strand of the double-stranded siNA molecule independently comprises about 15 to about 30 (e.g., about 15, 16, 17, 18, 19, 20, 21, 22, 23, 24, 25, 26, 27, 28, 29, or 30) nucleotides, wherein each strand comprises about 15 to about 30 (e.g., about 15, 16, 17, 18, 19, 20, 21, 22, 23, 24, 25, 26, 27, 28, 29, or 30) nucleotides that are complementary to the nucleotides of the other strand. In one embodiment, one of the strands of the double-stranded siNA molecule comprises a nucleotide sequence that is complementary to a nucleotide sequence or a portion thereof of the repeat expansion (RE) gene, and the second strand of the double-stranded siNA molecule comprises a nucleotide sequence substantially similar to the nucleotide sequence of the repeat expansion (RE) gene or a portion thereof.

[0038] In another embodiment, the invention features a double-stranded short interfering nucleic acid (siNA) molecule that down-regulates expression of a repeat expansion (RE) gene or that directs cleavage of a repeat expansion (RE) RNA, comprising an antisense region, wherein the antisense region comprises a nucleotide sequence that is complementary to a nucleotide sequence of the repeat expansion (RE) gene or a portion thereof, and a sense region, wherein the sense region comprises a nucleotide sequence substantially similar to the nucleotide sequence of the repeat expansion (RE) gene or a portion thereof. In one embodiment, the antisense region and the sense region independently comprise about 15 to about 30 (e.g. about 15, 16, 17, 18, 19, 20, 21, 22, 23, 24, 25, 26, 27, 28, 29, or 30) nucleotides, wherein the antisense region comprises about 15 to about 30 (e.g. about 15, 16, 17, 18, 19, 20, 21, 22, 23, 24, 25, 26, 27, 28, 29, or 30) nucleotides that are complementary to nucleotides of the sense region.

[0039] In another embodiment, the invention features a double-stranded short interfering nucleic acid (siNA) molecule that down-regulates expression of a repeat expansion (RE) gene or that directs cleavage of a repeat expansion (RE) RNA, comprising a sense region and an antisense region, wherein the antisense region comprises a nucleotide sequence that is complementary to a nucleotide sequence of RNA encoded by the repeat expansion (RE) gene or a portion thereof and the sense region comprises a nucleotide sequence that is complementary to the antisense region.

[0040] In one embodiment, a siNA molecule of the invention comprises blunt ends, i.e., ends that do not include any overhanging nucleotides. For example, a siNA molecule comprising modifications described herein (e.g., comprising nucleotides having Formulae I-VII or siNA constructs comprising “Stab 00”-“Stab 34” or “Stab 3F”-“Stab 34F” (Table IV) or any combination thereof (see Table IV)) and/or any length described herein can comprise blunt ends or ends with no overhanging nucleotides.

[0041] In one embodiment, any siNA molecule of the invention can comprise one or more blunt ends, i.e. where a blunt end does not have any overhanging nucleotides. In one embodiment, the blunt ended siNA molecule has a number of base pairs equal to the number of nucleotides present in each strand of the siNA molecule. In another embodiment, the siNA molecule comprises one blunt end, for example wherein the 5′-end of the antisense strand and the 3′-end of the sense strand do not have any overhanging nucleotides. In another example, the siNA molecule comprises one blunt end, for example wherein the 3′-end of the antisense strand and the 5′-end of the sense strand do not have any overhanging nucleotides. In another example, a siNA molecule comprises two blunt ends, for example wherein the 3′-end of the antisense strand and the 5′-end of the sense strand as well as the 5′-end of the antisense strand and 3′-end of the sense strand do not have any overhanging nucleotides. A blunt ended siNA molecule can comprise, for example, from about 15 to about 30 nucleotides (e.g., about 15, 16, 17, 18, 19, 20, 21, 22, 23, 24, 25, 26, 27, 28, 29, or 30 nucleotides). Other nucleotides present in a blunt ended siNA molecule can comprise, for example, mismatches, bulges, loops, or wobble base pairs to modulate the activity of the siNA molecule to mediate RNA interference.

[0042] By “blunt ends” is meant symmetric termini or termini of a double stranded siNA molecule having no overhanging nucleotides. The two strands of a double stranded siNA molecule align with each other without over-hanging nucleotides at the termini. For example, a blunt ended siNA construct comprises terminal nucleotides that are complementary between the sense and antisense regions of the siNA molecule.

[0043] In one embodiment, the invention features a double-stranded short interfering nucleic acid (siNA) molecule that down-regulates expression of a repeat expansion (RE) gene or that directs cleavage of a repeat expansion (RE) RNA, wherein the siNA molecule is assembled from two separate oligonucleotide fragments wherein one fragment comprises the sense region and the second fragment comprises the antisense region of the siNA molecule. The sense region can be connected to the antisense region via a linker molecule, such as a polynucleotide linker or a non-nucleotide linker.

[0044] In one embodiment, the invention features double-stranded short interfering nucleic acid (siNA) molecule that down-regulates expression of a repeat expansion (RE) gene or that directs cleavage of a repeat expansion (RE) RNA, wherein the siNA molecule comprises about 15 to about 30 (e.g. about 15, 16, 17, 18, 19, 20, 21, 22, 23, 24, 25, 26, 27, 28, 29, or 30) base pairs, and wherein each strand of the siNA molecule comprises one or more chemical modifications. In another embodiment, one of the strands of the double-stranded siNA molecule comprises a nucleotide sequence that is complementary to a nucleotide sequence of a repeat expansion (RE) gene or a portion thereof, and the second strand of the double-stranded siNA molecule comprises a nucleotide sequence substantially similar to the nucleotide sequence or a portion thereof of the repeat expansion (RE) gene. In another embodiment, one of the strands of the double-stranded siNA molecule comprises a nucleotide sequence that is complementary to a nucleotide sequence of a repeat expansion (RE) gene or portion thereof, and the second strand of the double-stranded siNA molecule comprises a nucleotide sequence substantially similar to the nucleotide sequence or portion thereof of the repeat expansion (RE) gene. In another embodiment, each strand of the siNA molecule comprises about 15 to about 30 (e.g. about 15, 16, 17, 18, 19, 20, 21, 22, 23, 24, 25, 26, 27, 28, 29, or 30) nucleotides, and each strand comprises at least about 15 to about 30 (e.g. about 15, 16, 17, 18, 19, 20, 21, 22, 23, 24, 25, 26, 27, 28, 29, or 30) nucleotides that are complementary to the nucleotides of the other strand. The repeat expansion (RE) gene can comprise, for example, sequences referred to in Table I.

[0045] In one embodiment, the repeat expansion (RE) gene can comprise, for example, huntingtin, SCA1, SCA2, SCA3, SCA6, SCA7, SCA12, SCA17, SBMA, or DRPLA (see for example Table I), including both mutant and wild type versions of such genes.

[0046] In one embodiment, a siNA molecule of the invention comprises no ribonucleotides. In another embodiment, a siNA molecule of the invention comprises ribonucleotides.

[0047] In one embodiment, a siNA molecule of the invention comprises an antisense region comprising a nucleotide sequence that is complementary to a nucleotide sequence of a repeat expansion (RE) gene or a portion thereof, and the siNA further comprises a sense region comprising a nucleotide sequence substantially similar to the nucleotide sequence of the repeat expansion (RE) gene or a portion thereof. In another embodiment, the antisense region and the sense region each comprise about 15 to about 30 (e.g. about 15, 16, 17, 18, 19, 20, 21, 22, 23, 24, 25, 26, 27, 28, 29, or 30) nucleotides and the antisense region comprises at least about 15 to about 30 (e.g. about 15, 16, 17, 18, 19, 20, 21, 22, 23, 24, 25, 26, 27, 28, 29, or 30) nucleotides that are complementary to nucleotides of the sense region. The repeat expansion (RE) gene can comprise, for example, sequences referred to in Table I. In another embodiment, the siNA is a double stranded nucleic acid molecule, where each of the two strands of the siNA molecule independently comprise about 15 to about 40 (e.g. about 15, 16, 17, 18, 19, 20, 21, 22, 23, 24, 25, 26, 27, 28, 29, 30, 31, 23, 33, 34, 35, 36, 37, 38, 39, or 40) nucleotides, and where one of the strands of the siNA molecule comprises at least about 15 (e.g. about 15, 16, 17, 18, 19, 20, 21, 22, 23, 24 or 25 or more) nucleotides that are complementary to the nucleic acid sequence of the repeat expansion (RE) gene or a portion thereof.

[0048] In one embodiment, a siNA molecule of the invention comprises a sense region and an antisense region, wherein the antisense region comprises a nucleotide sequence that is complementary to a nucleotide sequence of RNA encoded by a repeat expansion (RE) gene, or a portion thereof, and the sense region comprises a nucleotide sequence that is complementary to the antisense region. In one embodiment, the siNA molecule is assembled from two separate oligonucleotide fragments, wherein one fragment comprises the sense region and the second fragment comprises the antisense region of the siNA molecule. In another embodiment, the sense region is connected to the antisense region via a linker molecule. In another embodiment, the sense region is connected to the antisense region via a linker molecule, such as a nucleotide or non-nucleotide linker. The repeat expansion (RE) gene can comprise, for example, sequences referred in to Table I.

[0049] In one embodiment, the invention features a double-stranded short interfering nucleic acid (siNA) molecule that down-regulates expression of a repeat expansion (RE) gene or that directs cleavage of a repeat expansion (RE) RNA, comprising a sense region and an antisense region, wherein the antisense region comprises a nucleotide sequence that is complementary to a nucleotide sequence of RNA encoded by the repeat expansion (RE) gene or a portion thereof and the sense region comprises a nucleotide sequence that is complementary to the antisense region, and wherein the siNA molecule has one or more modified pyrimidine and/or purine nucleotides. In one embodiment, the pyrimidine nucleotides in the sense region are 2′-O-methylpyrimidine nucleotides or 2′-deoxy-2′-fluoro pyrimidine nucleotides and the purine nucleotides present in the sense region are 2′-deoxy purine nucleotides. In another embodiment, the pyrimidine nucleotides in the sense region are 2′-deoxy-2′-fluoro pyrimidine nucleotides and the purine nucleotides present in the sense region are 2′-O-methyl purine nucleotides. In another embodiment, the pyrimidine nucleotides in the sense region are 2′-deoxy-2′-fluoro pyrimidine nucleotides and the purine nucleotides present in the sense region are 2′-deoxy purine nucleotides. In one embodiment, the pyrimidine nucleotides in the antisense region are 2′-deoxy-2′-fluoro pyrimidine nucleotides and the purine nucleotides present in the antisense region are 2′-O-methyl or 2′-deoxy purine nucleotides. In another embodiment of any of the above-described siNA molecules, any nucleotides present in a non-complementary region of the sense strand (e.g. overhang region) are 2′-deoxy nucleotides.

[0050] In one embodiment, the invention features a double-stranded short interfering nucleic acid (siNA) molecule that down-regulates expression of a repeat expansion (RE) gene or that directs cleavage of a repeat expansion (RE) RNA, wherein the siNA molecule is assembled from two separate oligonucleotide fragments wherein one fragment comprises the sense region and the second fragment comprises the antisense region of the siNA molecule, and wherein the fragment comprising the sense region includes a terminal cap moiety at the 5′-end, the 3′-end, or both of the 5′ and 3′ ends of the fragment. In one embodiment, the terminal cap moiety is an inverted deoxy abasic moiety or glyceryl moiety. In one embodiment, each of the two fragments of the siNA molecule independently comprise about 15 to about 30 (e.g. about 15, 16, 17, 18, 19, 20, 21, 22, 23, 24, 25, 26, 27, 28, 29, or 30) nucleotides. In another embodiment, each of the two fragments of the siNA molecule independently comprise about 15 to about 40 (e.g. about 15, 16, 17, 18, 19, 20, 21, 22, 23, 24, 25, 26, 27, 28, 29, 30, 31, 23, 33, 34, 35, 36, 37, 38, 39, or 40) nucleotides. In a non-limiting example, each of the two fragments of the siNA molecule comprise about 21 nucleotides.

[0051] In one embodiment, the invention features a siNA molecule comprising at least one modified nucleotide, wherein the modified nucleotide is a 2′-deoxy-2′-fluoro nucleotide, 2′-O-trifluoromethyl nucleotide, 2′-O-ethyl-trifluoromethoxy nucleotide, or 2′-O-difluoromethoxy-ethoxy nucleotide or any other modified nucleoside/nucleotide described in U.S. Ser. No. 10/981,966 filed Nov. 5, 2004, incorporated by reference herein. The siNA can be, for example, about 15 to about 40 nucleotides in length. In one embodiment, all pyrimidine nucleotides present in the siNA are 2′-deoxy-2′-fluoro, 2′-O-trifluoromethyl, 2′-O-ethyl-trifluoromethoxy, or 2′-O-difluoromethoxy-ethoxy, 4′-thio pyrimidine nucleotides. In one embodiment, the modified nucleotides in the siNA include at least one 2′-deoxy-2′-fluoro cytidine or 2′-deoxy-2′-fluoro uridine nucleotide. In another embodiment, the modified nucleotides in the siNA include at least one 2′-fluoro cytidine and at least one 2′-deoxy-2′-fluoro uridine nucleotides. In one embodiment, all uridine nucleotides present in the siNA are 2′-deoxy-2′-fluoro uridine nucleotides. In one embodiment, all cytidine nucleotides present in the siNA are 2′-deoxy-2′-fluoro cytidine nucleotides. In one embodiment, all adenosine nucleotides present in the siNA are 2′-deoxy-2′-fluoro adenosine nucleotides. In one embodiment, all guanosine nucleotides present in the siNA are 2′-deoxy-2′-fluoro guanosine nucleotides. The siNA can further comprise at least one modified internucleotidic linkage, such as phosphorothioate linkage. In one embodiment, the 2′-deoxy-2′-fluoronucleotides are present at specifically selected locations in the siNA that are sensitive to cleavage by ribonucleases, such as locations having pyrimidine nucleotides.

[0052] In one embodiment, the invention features a method of increasing the stability of a siNA molecule against cleavage by ribonucleases comprising introducing at least one modified nucleotide into the siNA molecule, wherein the modified nucleotide is a 2′-deoxy-2′-fluoro nucleotide. In one embodiment, all pyrimidine nucleotides present in the siNA are 2′-deoxy-2′-fluoro pyrimidine nucleotides. In one embodiment, the modified nucleotides in the siNA include at least one 2′-deoxy-2′-fluoro cytidine or 2′-deoxy-2′-fluoro uridine nucleotide. In another embodiment, the modified nucleotides in the siNA include at least one 2′-fluoro cytidine and at least one 2′-deoxy-2′-fluoro uridine nucleotides. In one embodiment, all uridine nucleotides present in the siNA are 2′-deoxy-2′-fluoro uridine nucleotides. In one embodiment, all cytidine nucleotides present in the siNA are 2′-deoxy-2′-fluoro cytidine nucleotides. In one embodiment, all adenosine nucleotides present in the siNA are 2′-deoxy-2′-fluoro adenosine nucleotides. In one embodiment, all guanosine nucleotides present in the siNA are 2′-deoxy-2′-fluoro guanosine nucleotides. The siNA can further comprise at least one modified internucleotidic linkage, such as a phosphorothioate linkage. In one embodiment, the 2′-deoxy-2′-fluoronucleotides are present at specifically selected locations in the siNA that are sensitive to cleavage by ribonucleases, such as locations having pyrimidine nucleotides.

[0053] In one embodiment, the invention features a double-stranded short interfering nucleic acid (siNA) molecule that down-regulates expression of a repeat expansion (RE) gene or that directs cleavage of a repeat expansion (RE) RNA, comprising a sense region and an antisense region, wherein the antisense region comprises a nucleotide sequence that is complementary to a nucleotide sequence of RNA encoded by the repeat expansion (RE) gene or a portion thereof and the sense region comprises a nucleotide sequence that is complementary to the antisense region, and wherein the purine nucleotides present in the antisense region comprise 2′-deoxy-purine nucleotides. In an alternative embodiment, the purine nucleotides present in the antisense region comprise 2′-O-methyl purine nucleotides. In either of the above embodiments, the antisense region can comprise a phosphorothioate internucleotide linkage at the 3′ end of the antisense region. Alternatively, in either of the above embodiments, the antisense region can comprise a glyceryl modification at the 3′ end of the antisense region. In another embodiment of any of the above-described siNA molecules, any nucleotides present in a non-complementary region of the antisense strand (e.g. overhang region) are 2′-deoxy nucleotides.

[0054] In one embodiment, the antisense region of a siNA molecule of the invention comprises sequence complementary to a portion of an endogenous transcript having sequence unique to a particular repeat expansion (RE) disease or trait related allele in a subject or organism, such as sequence comprising a single nucleotide polymorphism (SNP) associated with the disease or trait specific allele. As such, the antisense region of a siNA molecule of the invention can comprise sequence complementary to sequences that are unique to a particular allele to provide specificity in mediating selective RNAi against the disease, condition, or trait related allele.

[0055] In one embodiment, the invention features a double-stranded short interfering nucleic acid (siNA) molecule that down-regulates expression of a repeat expansion (RE) gene or that directs cleavage of a repeat expansion (RE) RNA, wherein the siNA molecule is assembled from two separate oligonucleotide fragments wherein one fragment comprises the sense region and the second fragment comprises the antisense region of the siNA molecule. In another embodiment, the siNA molecule is a double stranded nucleic acid molecule, where each strand is about 21 nucleotides long and where about 19 nucleotides of each fragment of the siNA molecule are base-paired to the complementary nucleotides of the other fragment of the siNA molecule, wherein at least two 3′ terminal nucleotides of each fragment of the siNA molecule are not base-paired to the nucleotides of the other fragment of the siNA molecule. In another embodiment, the siNA molecule is a double stranded nucleic acid molecule, where each strand is about 19 nucleotide long and where the nucleotides of each fragment of the siNA molecule are base-paired to the complementary nucleotides of the other fragment of the siNA molecule to form at least about 15 (e.g., 15, 16, 17, 18, or 19) base pairs, wherein one or both ends of the siNA molecule are blunt ends. In one embodiment, each of the two 3′ terminal nucleotides of each fragment of the siNA molecule is a 2′-deoxy-pyrimidine nucleotide, such as a 2′-deoxy-thymidine. In another embodiment, all nucleotides of each fragment of the siNA molecule are base-paired to the complementary nucleotides of the other fragment of the siNA molecule. In another embodiment, the siNA molecule is a double stranded nucleic acid molecule of about 19 to about 25 base pairs having a sense region and an antisense region, where about 19 nucleotides of the antisense region are base-paired to the nucleotide sequence or a portion thereof of the RNA encoded by the repeat expansion (RE) gene. In another embodiment, about 21 nucleotides of the antisense region are base-paired to the nucleotide sequence or a portion thereof of the RNA encoded by the repeat expansion (RE) gene. In any of the above embodiments, the 5′-end of the fragment comprising said antisense region can optionally include a phosphate group.

[0056] In one embodiment, the invention features a double-stranded short interfering nucleic acid (siNA) molecule that inhibits the expression of a repeat expansion (RE) RNA sequence (e.g., wherein said target RNA sequence is encoded by a repeat expansion (RE) gene involved in the repeat expansion (RE) pathway), wherein the siNA molecule does not contain any ribonucleotides and wherein each strand of the double-stranded siNA molecule is about 15 to about 30 nucleotides. In one embodiment, the siNA molecule is 21 nucleotides in length. Examples of non-ribonucleotide containing siNA constructs are combinations of stabilization chemistries shown in Table IV in any combination of Sense/Antisense chemistries, such as Stab 7/8, Stab 7/11, Stab 8/8, Stab 18/8, Stab 18/11, Stab 12/13, Stab 7/13, Stab 18/13, Stab 7/19, Stab 8/19, Stab 18/19, Stab 7/20, Stab 8/20, Stab 18/20, Stab 7/32, Stab 8/32, or Stab 18/32 (e.g., any siNA having Stab 7, 8, 11, 12, 13, 14, 15, 17, 18, 19, 20, or 32 sense or antisense strands or any combination thereof). Herein, numeric Stab chemistries can include both 2′-fluoro and 2′-OCF3 versions of the chemistries shown in Table IV. For example, “Stab 7/8” refers to both Stab 7/8 and Stab 7F/8F etc. In one embodiment, the invention features a chemically synthesized double stranded RNA molecule that directs cleavage of a repeat expansion (RE) RNA via RNA interference, wherein each strand of said RNA molecule is about 15 to about 30 nucleotides in length; one strand of the RNA molecule comprises nucleotide sequence having sufficient complementarity to the repeat expansion (RE) RNA for the RNA molecule to direct cleavage of the repeat expansion (RE) RNA via RNA interference; and wherein at least one strand of the RNA molecule optionally comprises one or more chemically modified nucleotides described herein, such as without limitation deoxynucleotides, 2′-O-methyl nucleotides, 2′-deoxy-2′-fluoro nucleotides, 2′-O-methoxyethyl nucleotides, 4′-thio nucleotides, 2′-O-trifluoromethyl nucleotides, 2′-O-ethyl-trifluoromethoxy nucleotides, 2′-O-difluoromethoxy-ethoxy nucleotides, etc.

[0057] In one embodiment, the invention features a medicament comprising a siNA molecule of the invention.

[0058] In one embodiment, the invention features an active ingredient comprising a siNA molecule of the invention.

[0059] In one embodiment, the invention features the use of a double-stranded short interfering nucleic acid (siNA) molecule to inhibit, down-regulate, or reduce expression of a repeat expansion (RE) gene, wherein the siNA molecule comprises one or more chemical modifications and each strand of the double-stranded siNA is independently about 15 to about 30 or more (e.g., about 15, 16, 17, 18, 19, 20, 21, 22, 23, 24, 25, 26, 27, 28, 29 or 30 or more) nucleotides long. In one embodiment, the siNA molecule of the invention is a double stranded nucleic acid molecule comprising one or more chemical modifications, where each of the two fragments of the siNA molecule independently comprise about 15 to about 40 (e.g. about 15, 16, 17, 18, 19, 20, 21, 22, 23, 24, 25, 26, 27, 28, 29, 30, 31, 23, 33, 34, 35, 36, 37, 38, 39, or 40) nucleotides and where one of the strands comprises at least 15 nucleotides that are complementary to nucleotide sequence of repeat expansion (RE) encoding RNA or a portion thereof. In a non-limiting example, each of the two fragments of the siNA molecule comprise about 21 nucleotides. In another embodiment, the siNA molecule is a double stranded nucleic acid molecule comprising one or more chemical modifications, where each strand is about 21 nucleotide long and where about 19 nucleotides of each fragment of the siNA molecule are base-paired to the complementary nucleotides of the other fragment of the siNA molecule, wherein at least two 3′ terminal nucleotides of each fragment of the siNA molecule are not base-paired to the nucleotides of the other fragment of the siNA molecule. In another embodiment, the siNA molecule is a double stranded nucleic acid molecule comprising one or more chemical modifications, where each strand is about 19 nucleotide long and where the nucleotides of each fragment of the siNA molecule are base-paired to the complementary nucleotides of the other fragment of the siNA molecule to form at least about 15 (e.g., 15, 16, 17, 18, or 19) base pairs, wherein one or both ends of the siNA molecule are blunt ends. In one embodiment, each of the two 3′ terminal nucleotides of each fragment of the siNA molecule is a 2′-deoxy-pyrimidine nucleotide, such as a 2′-deoxy-thymidine. In another embodiment, all nucleotides of each fragment of the siNA molecule are base-paired to the complementary nucleotides of the other fragment of the siNA molecule. In another embodiment, the siNA molecule is a double stranded nucleic acid molecule of about 19 to about 25 base pairs having a sense region and an antisense region and comprising one or more chemical modifications, where about 19 nucleotides of the antisense region are base-paired to the nucleotide sequence or a portion thereof of the RNA encoded by the repeat expansion (RE) gene. In another embodiment, about 21 nucleotides of the antisense region are base-paired to the nucleotide sequence or a portion thereof of the RNA encoded by the repeat expansion (RE) gene. In any of the above embodiments, the 5′-end of the fragment comprising said antisense region can optionally include a phosphate group.

[0060] In one embodiment, the invention features the use of a double-stranded short interfering nucleic acid (siNA) molecule that inhibits, down-regulates, or reduces expression of a repeat expansion (RE) gene, wherein one of the strands of the double-stranded siNA molecule is an antisense strand which comprises nucleotide sequence that is complementary to nucleotide sequence of repeat expansion (RE) RNA or a portion thereof, the other strand is a sense strand which comprises nucleotide sequence that is complementary to a nucleotide sequence of the antisense strand and wherein a majority of the pyrimidine nucleotides present in the double-stranded siNA molecule comprises a sugar modification.

[0061] In one embodiment, the invention features a double-stranded short interfering nucleic acid (siNA) molecule that inhibits, down-regulates, or reduces expression of a repeat expansion (RE) gene, wherein one of the strands of the double-stranded siNA molecule is an antisense strand which comprises nucleotide sequence that is complementary to nucleotide sequence of repeat expansion (RE) RNA or a portion thereof, wherein the other strand is a sense strand which comprises nucleotide sequence that is complementary to a nucleotide sequence of the antisense strand and wherein a majority of the pyrimidine nucleotides present in the double-stranded siNA molecule comprises a sugar modification.

[0062] In one embodiment, the invention features a double-stranded short interfering nucleic acid (siNA) molecule that inhibits, down-regulates, or reduces expression of a repeat expansion (RE) gene, wherein one of the strands of the double-stranded siNA molecule is an antisense strand which comprises nucleotide sequence that is complementary to nucleotide sequence of repeat expansion (RE) RNA that encodes a protein or portion thereof, the other strand is a sense strand which comprises nucleotide sequence that is complementary to a nucleotide sequence of the antisense strand and wherein a majority of the pyrimidine nucleotides present in the double-stranded siNA molecule comprises a sugar modification. In one embodiment, each strand of the siNA molecule comprises about 15 to about 30 or more (e.g., about 15, 16, 17, 18, 19, 20, 21, 22, 23, 24, 25, 26, 27, 28, 29, or 30 or more) nucleotides, wherein each strand comprises at least about 15 nucleotides that are complementary to the nucleotides of the other strand. In one embodiment, the siNA molecule is assembled from two oligonucleotide fragments, wherein one fragment comprises the nucleotide sequence of the antisense strand of the siNA molecule and a second fragment comprises nucleotide sequence of the sense region of the siNA molecule. In one embodiment, the sense strand is connected to the antisense strand via a linker molecule, such as a polynucleotide linker or a non-nucleotide linker. In a further embodiment, the pyrimidine nucleotides present in the sense strand are 2′-deoxy-2′fluoro pyrimidine nucleotides and the purine nucleotides present in the sense region are 2′-deoxy purine nucleotides. In another embodiment, the pyrimidine nucleotides present in the sense strand are 2′-deoxy-2′fluoro pyrimidine nucleotides and the purine nucleotides present in the sense region are 2′-O-methyl purine nucleotides. In still another embodiment, the pyrimidine nucleotides present in the antisense strand are 2′-deoxy-2′-fluoro pyrimidine nucleotides and any purine nucleotides present in the antisense strand are 2′-deoxy purine nucleotides. In another embodiment, the antisense strand comprises one or more 2′-deoxy-2′-fluoro pyrimidine nucleotides and one or more 2′-O-methyl purine nucleotides. In another embodiment, the pyrimidine nucleotides present in the antisense strand are 2′-deoxy-2′-fluoro pyrimidine nucleotides and any purine nucleotides present in the antisense strand are 2′-O-methyl purine nucleotides. In a further embodiment the sense strand comprises a 3′-end and a 5′-end, wherein a terminal cap moiety (e.g., an inverted deoxy abasic moiety or inverted deoxy nucleotide moiety such as inverted thymidine) is present at the 5′-end, the 3′-end, or both of the 5′ and 3′ ends of the sense strand. In another embodiment, the antisense strand comprises a phosphorothioate internucleotide linkage at the 3′ end of the antisense strand. In another embodiment, the antisense strand comprises a glyceryl modification at the 3′ end. In another embodiment, the 5′-end of the antisense strand optionally includes a phosphate group.

[0063] In any of the above-described embodiments of a double-stranded short interfering nucleic acid (siNA) molecule that inhibits expression of a repeat expansion (RE) gene, wherein a majority of the pyrimidine nucleotides present in the double-stranded siNA molecule comprises a sugar modification, each of the two strands of the siNA molecule can comprise about 15 to about 30 or more (e.g., about 15, 16, 17, 18, 19, 20, 21, 22, 23, 24, 25, 26, 27, 28, 29, or 30 or more) nucleotides. In one embodiment, about 15 to about 30 or more (e.g., about 15, 16, 17, 18, 19, 20, 21, 22, 23, 24, 25, 26, 27, 28, 29, or 30 or more) nucleotides of each strand of the siNA molecule are base-paired to the complementary nucleotides of the other strand of the siNA molecule. In another embodiment, about 15 to about 30 or more (e.g., about 15, 16, 17, 18, 19, 20, 21, 22, 23, 24, 25, 26, 27, 28, 29, or 30 or more) nucleotides of each strand of the siNA molecule are base-paired to the complementary nucleotides of the other strand of the siNA molecule, wherein at least two 3′ terminal nucleotides of each strand of the siNA molecule are not base-paired to the nucleotides of the other strand of the siNA molecule. In another embodiment, each of the two 3′ terminal nucleotides of each fragment of the siNA molecule is a 2′-deoxy-pyrimidine, such as 2′-deoxy-thymidine. In one embodiment, each strand of the siNA molecule is base-paired to the complementary nucleotides of the other strand of the siNA molecule. In one embodiment, about 15 to about 30 (e.g., about 15, 16, 17, 18, 19, 20, 21, 22, 23, 24, 25, 26, 27, 28, 29, or 30) nucleotides of the antisense strand are base-paired to the nucleotide sequence of the repeat expansion (RE) RNA or a portion thereof. In one embodiment, about 18 to about 25 (e.g., about 18, 19, 20, 21, 22, 23, 24, or 25) nucleotides of the antisense strand are base-paired to the nucleotide sequence of the repeat expansion (RE) RNA or a portion thereof.

[0064] In one embodiment, the invention features a double-stranded short interfering nucleic acid (siNA) molecule that inhibits expression of a repeat expansion (RE) gene, wherein one of the strands of the double-stranded siNA molecule is an antisense strand which comprises nucleotide sequence that is complementary to nucleotide sequence of repeat expansion (RE) RNA or a portion thereof, the other strand is a sense strand which comprises nucleotide sequence that is complementary to a nucleotide sequence of the antisense strand and wherein a majority of the pyrimidine nucleotides present in the double-stranded siNA molecule comprises a sugar modification, and wherein the 5′-end of the antisense strand optionally includes a phosphate group.

[0065] In one embodiment, the invention features a double-stranded short interfering nucleic acid (siNA) molecule that inhibits expression of a repeat expansion (RE) gene, wherein one of the strands of the double-stranded siNA molecule is an antisense strand which comprises nucleotide sequence that is complementary to nucleotide sequence of repeat expansion (RE) RNA or a portion thereof, the other strand is a sense strand which comprises nucleotide sequence that is complementary to a nucleotide sequence of the antisense strand and wherein a majority of the pyrimidine nucleotides present in the double-stranded siNA molecule comprises a sugar modification, and wherein the nucleotide sequence or a portion thereof of the antisense strand is complementary to a nucleotide sequence of the untranslated region or a portion thereof of the repeat expansion (RE) RNA.

[0066] In one embodiment, the invention features a double-stranded short interfering nucleic acid (siNA) molecule that inhibits expression of a repeat expansion (RE) gene, wherein one of the strands of the double-stranded siNA molecule is an antisense strand which comprises nucleotide sequence that is complementary to nucleotide sequence of repeat expansion (RE) RNA or a portion thereof, wherein the other strand is a sense strand which comprises nucleotide sequence that is complementary to a nucleotide sequence of the antisense strand, wherein a majority of the pyrimidine nucleotides present in the double-stranded siNA molecule comprises a sugar modification, and wherein the nucleotide sequence of the antisense strand is complementary to a nucleotide sequence of the repeat expansion (RE) RNA or a portion thereof that is present in the repeat expansion (RE) RNA.

[0067] In one embodiment, the invention features a composition comprising a siNA molecule of the invention in a pharmaceutically acceptable carrier or diluent.

[0068] In a non-limiting example, the introduction of chemically-modified nucleotides into nucleic acid molecules provides a powerful tool in overcoming potential limitations of in vivo stability and bioavailability inherent to native RNA molecules that are delivered exogenously. For example, the use of chemically-modified nucleic acid molecules can enable a lower dose of a particular nucleic acid molecule for a given therapeutic effect since chemically-modified nucleic acid molecules tend to have a longer half-life in serum. Furthermore, certain chemical modifications can improve the bioavailability of nucleic acid molecules by targeting particular cells or tissues and/or improving cellular uptake of the nucleic acid molecule. Therefore, even if the activity of a chemically-modified nucleic acid molecule is reduced as compared to a native nucleic acid molecule, for example, when compared to an all-RNA nucleic acid molecule, the overall activity of the modified nucleic acid molecule can be greater than that of the native molecule due to improved stability and/or delivery of the molecule. Unlike native unmodified siNA, chemically-modified siNA can also minimize the possibility of activating interferon activity or immunostimulation in humans.

[0069] In any of the embodiments of siNA molecules described herein, the antisense region of a siNA molecule of the invention can comprise a phosphorothioate internucleotide linkage at the 3′-end of said antisense region. In any of the embodiments of siNA molecules described herein, the antisense region can comprise about one to about five phosphorothioate internucleotide linkages at the 5′-end of said antisense region. In any of the embodiments of siNA molecules described herein, the 3′-terminal nucleotide overhangs of a siNA molecule of the invention can comprise ribonucleotides or deoxyribonucleotides that are chemically-modified at a nucleic acid sugar, base, or backbone. In any of the embodiments of siNA molecules described herein, the 3′-terminal nucleotide overhangs can comprise one or more universal base ribonucleotides. In any of the embodiments of siNA molecules described herein, the 3′-terminal nucleotide overhangs can comprise one or more acyclic nucleotides.

[0070] One embodiment of the invention provides an expression vector comprising a nucleic acid sequence encoding at least one siNA molecule of the invention in a manner that allows expression of the nucleic acid molecule. Another embodiment of the invention provides a mammalian cell comprising such an expression vector. The mammalian cell can be a human cell. The siNA molecule of the expression vector can comprise a sense region and an antisense region. The antisense region can comprise sequence complementary to a RNA or DNA sequence encoding repeat expansion (RE) and the sense region can comprise sequence complementary to the antisense region. The siNA molecule can comprise two distinct strands having complementary sense and antisense regions. The siNA molecule can comprise a single strand having complementary sense and antisense regions.

[0071] In one embodiment, the invention features a chemically-modified short interfering nucleic acid (siNA) molecule capable of mediating RNA interference (RNAi) against repeat expansion (RE) inside a cell or reconstituted in vitro system, wherein the chemical modification comprises one or more (e.g., about 1, 2, 3, 4, 5, 6, 7, 8, 9, 10, or more) nucleotides comprising a backbone modified internucleotide linkage having Formula I: [chemical structure]
[0072] wherein each R1 and R2 is independently any nucleotide, non-nucleotide, or polynucleotide which can be naturally-occurring or chemically-modified, each X and Y is independently O, S, N, alkyl, or substituted alkyl, each Z and W is independently O, S, N, alkyl, substituted alkyl, O-alkyl, S-alkyl, alkaryl, aralkyl, or acetyl and wherein W, X, Y, and Z are optionally not all O. In another embodiment, a backbone modification of the invention comprises a phosphonoacetate and/or thiophosphonoacetate internucleotide linkage (see for example Sheehan et al., 2003, Nucleic Acids Research, 31, 4109-4118).

[0073] The chemically-modified internucleotide linkages having Formula I, for example, wherein any Z, W, X, and/or Y independently comprises a sulphur atom, can be present in one or both oligonucleotide strands of the siNA duplex, for example, in the sense strand, the antisense strand, or both strands. The siNA molecules of the invention can comprise one or more (e.g., about 1, 2, 3, 4, 5, 6, 7, 8, 9, 10, or more) chemically-modified internucleotide linkages having Formula I at the 3′-end, the 5′-end, or both of the 3′ and 5′-ends of the sense strand, the antisense strand, or both strands. For example, an exemplary siNA molecule of the invention can comprise about 1 to about 5 or more (e.g., about 1, 2, 3, 4, 5, or more) chemically-modified internucleotide linkages having Formula I at the 5′-end of the sense strand, the antisense strand, or both strands. In another non-limiting example, an exemplary siNA molecule of the invention can comprise one or more (e.g., about 1, 2, 3, 4, 5, 6, 7, 8, 9, 10, or more) pyrimidine nucleotides with chemically-modified internucleotide linkages having Formula I in the sense strand, the antisense strand, or both strands. In yet another non-limiting example, an exemplary siNA molecule of the invention can comprise one or more (e.g., about 1, 2, 3, 4, 5, 6, 7, 8, 9, 10, or more) purine nucleotides with chemically-modified internucleotide linkages having Formula I in the sense strand, the antisense strand, or both strands. In another embodiment, a siNA molecule of the invention having internucleotide linkage(s) of Formula I also comprises a chemically-modified nucleotide or non-nucleotide having any of Formulae I-VII.

[0074] In one embodiment, the invention features a chemically-modified short interfering nucleic acid (siNA) molecule capable of mediating RNA interference (RNAi) against repeat expansion (RE) inside a cell or reconstituted in vitro system, wherein the chemical modification comprises one or more (e.g., about 1, 2, 3, 4, 5, 6, 7, 8, 9, 10, or more) nucleotides or non-nucleotides having Formula II: [chemical structure]
wherein each R3, R4, R5, R6, R7, R8, R10, R11 and R12 is independently H, OH, alkyl, substituted alkyl, alkaryl or aralkyl, F, Cl, Br, CN, CF3, OCF3, OCN, O-alkyl, S-alkyl, N-alkyl, O-alkenyl, S-alkenyl, N-alkenyl, SO-alkyl, alkyl-OSH, alkyl-OH, O-alkyl-OH, O-alkyl-SH, S-alkyl-OH, S-alkyl-SH, alkyl-S-alkyl, alkyl-O-alkyl, ONO2, NO2, N3, NH2, aminoalkyl, aminoacid, aminoacyl, ONH2, O-aminoalkyl, O-aminoacid, O-aminoacyl, heterocycloalkyl, heterocycloalkaryl, aminoalkylamino, polyalklylamino, substituted silyl, or group having Formula I or II; R9 is O, S, CH2, S═O, CHF, or CF2, and B is a nucleosidic base such as adenine, guanine, uracil, cytosine, thymine, 2-aminoadenosine, 5-methylcytosine, 2,6-diaminopurine, or any other non-naturally occurring base that can be complementary or non-complementary to target RNA or a non-nucleosidic base such as phenyl, naphthyl, 3-nitropyrrole, 5-nitroindole, nebularine, pyridone, pyridinone, or any other non-naturally occurring universal base that can be complementary or non-complementary to target RNA. In one embodiment, R3 and/or R7 comprises a conjugate moiety and a linker (e.g., a nucleotide or non-nucleotide linker as described herein or otherwise known in the art). Non-limiting examples of conjugate moieties include ligands for cellular receptors, such as peptides derived from naturally occurring protein ligands; protein localization sequences, including cellular ZIP code sequences; antibodies; nucleic acid aptamers; vitamins and other co-factors, such as folate and N-acetylgalactosamine; polymers, such as polyethyleneglycol (PEG); phospholipids; cholesterol; steroids, and polyamines, such as PEI, spermine or spermidine.

[0075] The chemically-modified nucleotide or non-nucleotide of Formula II can be present in one or both oligonucleotide strands of the siNA duplex, for example in the sense strand, the antisense strand, or both strands. The siNA molecules of the invention can comprise one or more chemically-modified nucleotides or non-nucleotides of Formula II at the 3′-end, the 5′-end, or both of the 3′ and 5′-ends of the sense strand, the antisense strand, or both strands. For example, an exemplary siNA molecule of the invention can comprise about 1 to about 5 or more (e.g., about 1, 2, 3, 4, 5, or more) chemically-modified nucleotides or non-nucleotides of Formula II at the 5′-end of the sense strand, the antisense strand, or both strands. In anther non-limiting example, an exemplary siNA molecule of the invention can comprise about 1 to about 5 or more (e.g., about 1, 2, 3, 4, 5, or more) chemically-modified nucleotides or non-nucleotides of Formula II at the 3′-end of the sense strand, the antisense strand, or both strands.

[0076] In one embodiment, the invention features a chemically-modified short interfering nucleic acid (siNA) molecule capable of mediating RNA interference (RNAi) against repeat expansion (RE) inside a cell or reconstituted in vitro system, wherein the chemical modification comprises one or more (e.g., about 1, 2, 3, 4, 5, 6, 7, 8, 9, 10, or more) nucleotides or non-nucleotides having Formula III: [chemical structure]
wherein each R3, R4, R5, R6, R7, R8, R10, R11 and R12 is independently H, OH, alkyl, substituted alkyl, alkaryl or aralkyl, F, Cl, Br, CN, CF3, OCF3, OCN, O-alkyl, S-alkyl, N-alkyl, O-alkenyl, S-alkenyl, N-alkenyl, SO-alkyl, alkyl-OSH, alkyl-OH, O-alkyl-OH, O-alkyl-SH, S-alkyl-OH, S-alkyl-SH, alkyl-S-alkyl, alkyl-O-alkyl, ONO2, NO2, N3, NH2, aminoalkyl, aminoacid, aminoacyl, ONO2, O-aminoalkyl, O-aminoacid, O-aminoacyl, heterocycloalkyl, heterocycloalkaryl, aminoalkylamino, polyalklylamino, substituted silyl, or group having Formula I or II; R9 is O, S, CH2, S═O, CHF, or CF2, and B is a nucleosidic base such as adenine, guanine, uracil, cytosine, thymine, 2-aminoadenosine, 5-methylcytosine, 2,6-diaminopurine, or any other non-naturally occurring base that can be employed to be complementary or non-complementary to target RNA or a non-nucleosidic base such as phenyl, naphthyl, 3-nitropyrrole, 5-nitroindole, nebularine, pyridone, pyridinone, or any other non-naturally occurring universal base that can be complementary or non-complementary to target RNA. In one embodiment, R3 and/or R7 comprises a conjugate moiety and a linker (e.g., a nucleotide or non-nucleotide linker as described herein or otherwise known in the art). Non-limiting examples of conjugate moieties include ligands for cellular receptors, such as peptides derived from naturally occurring protein ligands; protein localization sequences, including cellular ZIP code sequences; antibodies; nucleic acid aptamers; vitamins and other co-factors, such as folate and N-acetylgalactosamine; polymers, such as polyethyleneglycol (PEG); phospholipids; cholesterol; steroids, and polyamines, such as PEI, spermine or spermidine.

[0077] The chemically-modified nucleotide or non-nucleotide of Formula III can be present in one or both oligonucleotide strands of the siNA duplex, for example, in the sense strand, the antisense strand, or both strands. The siNA molecules of the invention can comprise one or more chemically-modified nucleotides or non-nucleotides of Formula III at the 3′-end, the 5′-end, or both of the 3′ and 5′-ends of the sense strand, the antisense strand, or both strands. For example, an exemplary siNA molecule of the invention can comprise about 1 to about 5 or more (e.g., about 1, 2, 3, 4, 5, or more) chemically-modified nucleotide(s) or non-nucleotide(s) of Formula III at the 5′-end of the sense strand, the antisense strand, or both strands. In anther non-limiting example, an exemplary siNA molecule of the invention can comprise about 1 to about 5 or more (e.g., about 1, 2, 3, 4, 5, or more) chemically-modified nucleotide or non-nucleotide of Formula III at the 3′-end of the sense strand, the antisense strand, or both strands.

[0078] In another embodiment, a siNA molecule of the invention comprises a nucleotide having Formula II or III, wherein the nucleotide having Formula II or III is in an inverted configuration. For example, the nucleotide having Formula II or III is connected to the siNA construct in a 3′-3′,3′-2′,2′-3′, or 5′-5′ configuration, such as at the 3′-end, the 5′-end, or both of the 3′ and 5′-ends of one or both siNA strands.

[0079] In one embodiment, the invention features a chemically-modified short interfering nucleic acid (siNA) molecule capable of mediating RNA interference (RNAi) against repeat expansion (RE) inside a cell or reconstituted in vitro system, wherein the chemical modification comprises a 5′-terminal phosphate group having Formula IV: [chemical structure]
wherein each X and Y is independently O, S, N, alkyl, substituted alkyl, or alkylhalo; wherein each Z and W is independently O, S, N, alkyl, substituted alkyl, O-alkyl, S-alkyl, alkaryl, aralkyl, alkylhalo, or acetyl; and wherein W, X, Y and Z are not all 0.

[0080] In one embodiment, the invention features a siNA molecule having a 5′-terminal phosphate group having Formula IV on the target-complementary strand, for example, a strand complementary to a target RNA, wherein the siNA molecule comprises an all RNA siNA molecule. In another embodiment, the invention features a siNA molecule having a 5′-terminal phosphate group having Formula IV on the target-complementary strand wherein the siNA molecule also comprises about 1 to about 3 (e.g., about 1, 2, or 3) nucleotide 3′-terminal nucleotide overhangs having about 1 to about 4 (e.g., about 1, 2, 3, or 4) deoxyribonucleotides on the 3′-end of one or both strands. In another embodiment, a 5′-terminal phosphate group having Formula IV is present on the target-complementary strand of a siNA molecule of the invention, for example a siNA molecule having chemical modifications having any of Formulae I-VII.

[0081] In one embodiment, the invention features a chemically-modified short interfering nucleic acid (siNA) molecule capable of mediating RNA interference (RNAi) against repeat expansion (RE) inside a cell or reconstituted in vitro system, wherein the chemical modification comprises one or more phosphorothioate internucleotide linkages. For example, in a non-limiting example, the invention features a chemically-modified short interfering nucleic acid (siNA) having about 1, 2, 3, 4, 5, 6, 7, 8 or more phosphorothioate internucleotide linkages in one siNA strand. In yet another embodiment, the invention features a chemically-modified short interfering nucleic acid (siNA) individually having about 1, 2, 3, 4, 5, 6, 7, 8 or more phosphorothioate internucleotide linkages in both siNA strands. The phosphorothioate internucleotide linkages can be present in one or both oligonucleotide strands of the siNA duplex, for example in the sense strand, the antisense strand, or both strands. The siNA molecules of the invention can comprise one or more phosphorothioate internucleotide linkages at the 3′-end, the 5′-end, or both of the 3′- and 5′-ends of the sense strand, the antisense strand, or both strands. For example, an exemplary siNA molecule of the invention can comprise about 1 to about 5 or more (e.g., about 1, 2, 3, 4, 5, or more) consecutive phosphorothioate internucleotide linkages at the 5′-end of the sense strand, the antisense strand, or both strands. In another non-limiting example, an exemplary siNA molecule of the invention can comprise one or more (e.g., about 1, 2, 3, 4, 5, 6, 7, 8, 9, 10, or more) pyrimidine phosphorothioate internucleotide linkages in the sense strand, the antisense strand, or both strands. In yet another non-limiting example, an exemplary siNA molecule of the invention can comprise one or more (e.g., about 1, 2, 3, 4, 5, 6, 7, 8, 9, 10, or more) purine phosphorothioate internucleotide linkages in the sense strand, the antisense strand, or both strands.

[0082] In one embodiment, the invention features a siNA molecule, wherein the sense strand comprises one or more, for example, about 1, 2, 3, 4, 5, 6, 7, 8, 9, 10, or more phosphorothioate internucleotide linkages, and/or one or more (e.g., about 1, 2, 3, 4, 5, 6, 7, 8, 9, 10 or more) 2′-deoxy, 2′-O-methyl, 2′-deoxy-2′-fluoro, 2′-O-trifluoromethyl, 2′-O-ethyl-trifluoromethoxy, 2′-O-difluoromethoxy-ethoxy and/or about one or more (e.g., about 1, 2, 3, 4, 5, 6, 7, 8, 9, 10 or more) universal base modified nucleotides, and optionally a terminal cap molecule at the 3′-end, the 5′-end, or both of the 3′- and 5′-ends of the sense strand; and wherein the antisense strand comprises about 1 to about 10 or more, specifically about 1, 2, 3, 4, 5, 6, 7, 8, 9, 10, or more phosphorothioate internucleotide linkages, and/or one or more (e.g., about 1, 2, 3, 4, 5, 6, 7, 8, 9, 10 or more) 2′-deoxy, 2′-O-methyl, 2′-deoxy-2′-fluoro, 2′-O-trifluoromethyl, 2′-O-ethyl-trifluoromethoxy, 2′-O-difluoromethoxy-ethoxy, 4′-thio and/or one or more (e.g., about 1, 2, 3, 4, 5, 6, 7, 8, 9, 10 or more) universal base modified nucleotides, and optionally a terminal cap molecule at the 3′-end, the 5′-end, or both of the 3′- and 5′-ends of the antisense strand. In another embodiment, one or more, for example about 1, 2, 3, 4, 5, 6, 7, 8, 9, 10, or more, pyrimidine nucleotides of the sense and/or antisense siNA strand are chemically-modified with 2′-deoxy, 2′-O-methyl, 2′-O-trifluoromethyl, 2′-O-ethyl-trifluoromethoxy, 2′-O-difluoromethoxy-ethoxy, 4′-thio and/or 2′-deoxy-2′-fluoro nucleotides, with or without one or more, for example about 1, 2, 3, 4, 5, 6, 7, 8, 9, 10, or more, phosphorothioate internucleotide linkages and/or a terminal cap molecule at the 3′end, the 5′-end, or both of the 3′- and 5′-ends, being present in the same or different strand.

[0083] In another embodiment, the invention features a siNA molecule, wherein the sense strand comprises about 1 to about 5, specifically about 1, 2, 3, 4, or 5 phosphorothioate internucleotide linkages, and/or one or more (e.g., about 1, 2, 3, 4, 5, or more) 2′-deoxy, 2′-O-methyl, 2′-deoxy-2′-fluoro, 2′-O-trifluoromethyl, 2′-O-ethyl-trifluoromethoxy, 2′-O-difluoromethoxy-ethoxy, 4′-thio and/or one or more (e.g., about 1, 2, 3, 4, 5, or more) universal base modified nucleotides, and optionally a terminal cap molecule at the 3-end, the 5′-end, or both of the 3′- and 5′-ends of the sense strand; and wherein the antisense strand comprises about 1 to about 5 or more, specifically about 1, 2, 3, 4, 5, or more phosphorothioate internucleotide linkages, and/or one or more (e.g., about 1, 2, 3, 4, 5, 6, 7, 8, 9, 10 or more) 2′-deoxy, 2′-O-methyl, 2′-deoxy-2′-fluoro, 2′-O-trifluoromethyl, 2′-O-ethyl-trifluoromethoxy, 2′-O-difluoromethoxy-ethoxy, 4′-thio and/or one or more (e.g., about 1, 2, 3, 4, 5, 6, 7, 8, 9, 10 or more) universal base modified nucleotides, and optionally a terminal cap molecule at the 3′-end, the 5′-end, or both of the 3′- and 5′-ends of the antisense strand. In another embodiment, one or more, for example about 1, 2, 3, 4, 5, 6, 7, 8, 9, 10, or more, pyrimidine nucleotides of the sense and/or antisense siNA strand are chemically-modified with 2′-deoxy, 2′-O-methyl, 2′-O-trifluoromethyl, 2′-O-ethyl-trifluoromethoxy, 2′-O-difluoromethoxy-ethoxy, 4′-thio and/or 2′-deoxy-2′-fluoro nucleotides, with or without about 1 to about 5 or more, for example about 1, 2, 3, 4, 5, or more phosphorothioate internucleotide linkages and/or a terminal cap molecule at the 3′-end, the 5′-end, or both of the 3′- and 5′-ends, being present in the same or different strand.

[0084] In one embodiment, the invention features a siNA molecule, wherein the antisense strand comprises one or more, for example, about 1, 2, 3, 4, 5, 6, 7, 8, 9, 10, or more phosphorothioate internucleotide linkages, and/or about one or more (e.g., about 1, 2, 3, 4, 5, 6, 7, 8, 9, 10 or more) 2′-deoxy, 2′-O-methyl, 2′-deoxy-2′-fluoro, 2′-O-trifluoromethyl, 2′-O-ethyl-trifluoromethoxy, 2′-O-difluoromethoxy-ethoxy, 4′-thio and/or one or more (e.g., about 1, 2, 3, 4, 5, 6, 7, 8, 9, 10 or more) universal base modified nucleotides, and optionally a terminal cap molecule at the 3′-end, the 5′-end, or both of the 3′- and 5′-ends of the sense strand; and wherein the antisense strand comprises about 1 to about 10 or more, specifically about 1, 2, 3, 4, 5, 6, 7, 8, 9, 10 or more phosphorothioate internucleotide linkages, and/or one or more (e.g., about 1, 2, 3, 4, 5, 6, 7, 8, 9, 10 or more) 2′-deoxy, 2′-O-methyl, 2′-deoxy-2′-fluoro, 2′-O-trifluoromethyl, 2′-O-ethyl-trifluoromethoxy, 2′-O-difluoromethoxy-ethoxy, 4′-thio and/or one or more (e.g., about 1, 2, 3, 4, 5, 6, 7, 8, 9, 10 or more) universal base modified nucleotides, and optionally a terminal cap molecule at the 3′-end, the 5′-end, or both of the 3′- and 5′-ends of the antisense strand. In another embodiment, one or more, for example about 1, 2, 3, 4, 5, 6, 7, 8, 9, 10 or more pyrimidine nucleotides of the sense and/or antisense siNA strand are chemically-modified with 2′-deoxy, 2′-O-methyl, 2′-O-trifluoromethyl, 2′-O-ethyl-trifluoromethoxy, 2′-O-difluoromethoxy-ethoxy, 4′-thio and/or 2′-deoxy-2′-fluoro nucleotides, with or without one or more, for example, about 1, 2, 3, 4, 5, 6, 7, 8, 9, 10 or more phosphorothioate internucleotide linkages and/or a terminal cap molecule at the 3′-end, the 5′-end, or both of the 3′ and 5′-ends, being present in the same or different strand.

[0085] In another embodiment, the invention features a siNA molecule, wherein the antisense strand comprises about 1 to about 5 or more, specifically about 1, 2, 3, 4, 5 or more phosphorothioate internucleotide linkages, and/or one or more (e.g., about 1, 2, 3, 4, 5, 6, 7, 8, 9, 10 or more) 2′-deoxy, 2′-O-methyl, 2′-deoxy-2′-fluoro, 2′-O-trifluoromethyl, 2′-O-ethyl-trifluoromethoxy, 2′-O-difluoromethoxy-ethoxy, 4′-thio and/or one or more (e.g., about 1, 2, 3, 4, 5, 6, 7, 8, 9, 10 or more) universal base modified nucleotides, and optionally a terminal cap molecule at the 3′-end, the 5′-end, or both of the 3′- and 5′-ends of the sense strand; and wherein the antisense strand comprises about 1 to about 5 or more, specifically about 1, 2, 3, 4, 5 or more phosphorothioate internucleotide linkages, and/or one or more (e.g., about 1, 2, 3, 4, 5, 6, 7, 8, 9, 10 or more) 2′-deoxy, 2′-O-methyl, 2′-deoxy-2′-fluoro, 2′-O-trifluoromethyl, 2′-O-ethyl-trifluoromethoxy, 2′-O-difluoromethoxy-ethoxy, 4′-thio and/or one or more (e.g., about 1, 2, 3, 4, 5, 6, 7, 8, 9, 10 or more) universal base modified nucleotides, and optionally a terminal cap molecule at the 3′-end, the 5′-end, or both of the 3′- and 5′-ends of the antisense strand. In another embodiment, one or more, for example about 1, 2, 3, 4, 5, 6, 7, 8, 9, 10 or more pyrimidine nucleotides of the sense and/or antisense siNA strand are chemically-modified with 2′-deoxy, 2′-O-methyl, 2′-O-trifluoromethyl, 2′-O-ethyl-trifluoromethoxy, 2′-O-difluoromethoxy-ethoxy, 4′-thio and/or 2′-deoxy-2′-fluoro nucleotides, with or without about 1 to about 5, for example about 1, 2, 3, 4, 5 or more phosphorothioate internucleotide linkages and/or a terminal cap molecule at the 3′-end, the 5′-end, or both of the 3′- and 5′-ends, being present in the same or different strand.

[0086] In one embodiment, the invention features a chemically-modified short interfering nucleic acid (siNA) molecule having about 1 to about 5 or more (specifically about 1, 2, 3, 4, 5 or more) phosphorothioate internucleotide linkages in each strand of the siNA molecule.

[0087] In another embodiment, the invention features a siNA molecule comprising 2′-5′ internucleotide linkages. The 2′-5′ internucleotide linkage(s) can be at the 3′-end, the 5′-end, or both of the 3′- and 5′-ends of one or both siNA sequence strands. In addition, the 2′-5′ internucleotide linkage(s) can be present at various other positions within one or both siNA sequence strands, for example, about 1, 2, 3, 4, 5, 6, 7, 8, 9, 10, or more including every internucleotide linkage of a pyrimidine nucleotide in one or both strands of the siNA molecule can comprise a 2′-5′ internucleotide linkage, or about 1, 2, 3, 4, 5, 6, 7, 8, 9, 10, or more including every internucleotide linkage of a purine nucleotide in one or both strands of the siNA molecule can comprise a 2′-5′ internucleotide linkage.

[0088] In another embodiment, a chemically-modified siNA molecule of the invention comprises a duplex having two strands, one or both of which can be chemically-modified, wherein each strand is independently about 15 to about 30 (e.g., about 15, 16, 17, 18, 19, 20, 21, 22, 23, 24, 25, 26, 27, 28, 29, or 30) nucleotides in length, wherein the duplex has about 15 to about 30 (e.g., about 15, 16, 17, 18, 19, 20, 21, 22, 23, 24, 25, 26, 27, 28, 29, or 30) base pairs, and wherein the chemical modification comprises a structure having any of Formulae I-VII. For example, an exemplary chemically-modified siNA molecule of the invention comprises a duplex having two strands, one or both of which can be chemically-modified with a chemical modification having any of Formulae I-VII or any combination thereof, wherein each strand consists of about 21 nucleotides, each having a 2-nucleotide 3′-terminal nucleotide overhang, and wherein the duplex has about 19 base pairs. In another embodiment, a siNA molecule of the invention comprises a single stranded hairpin structure, wherein the siNA is about 36 to about 70 (e.g., about 36, 40, 45, 50, 55, 60, 65, or 70) nucleotides in length having about 15 to about 30 (e.g., about 15, 16, 17, 18, 19, 20, 21, 22, 23, 24, 25, 26, 27, 28, 29, or 30) base pairs, and wherein the siNA can include a chemical modification comprising a structure having any of Formulae I-VII or any combination thereof. For example, an exemplary chemically-modified siNA molecule of the invention comprises a linear oligonucleotide having about 42 to about 50 (e.g., about 42, 43, 44, 45, 46, 47, 48, 49, or 50) nucleotides that is chemically-modified with a chemical modification having any of Formulae I-VII or any combination thereof, wherein the linear oligonucleotide forms a hairpin structure having about 19 to about 21 (e.g., 19, 20, or 21) base pairs and a 2-nucleotide 3′-terminal nucleotide overhang. In another embodiment, a linear hairpin siNA molecule of the invention contains a stem loop motif, wherein the loop portion of the siNA molecule is biodegradable. For example, a linear hairpin siNA molecule of the invention is designed such that degradation of the loop portion of the siNA molecule in vivo can generate a double-stranded siNA molecule with 3′-terminal overhangs, such as 3′-terminal nucleotide overhangs comprising about 2 nucleotides.

[0089] In another embodiment, a siNA molecule of the invention comprises a hairpin structure, wherein the siNA is about 25 to about 50 (e.g., about 25, 26, 27, 28, 29, 30, 31, 32, 33, 34, 35, 36, 37, 38, 39, 40, 41, 42, 43, 44, 45, 46, 47, 48, 49, or 50) nucleotides in length having about 3 to about 25 (e.g., about 3, 4, 5, 6, 7, 8, 9, 10, 11, 12, 13, 14, 15, 16, 17, 18, 19, 20, 21, 22, 23, 24, or 25) base pairs, and wherein the siNA can include one or more chemical modifications comprising a structure having any of Formulae I-VII or any combination thereof. For example, an exemplary chemically-modified siNA molecule of the invention comprises a linear oligonucleotide having about 25 to about 35 (e.g., about 25, 26, 27, 28, 29, 30, 31, 32, 33, 34, or 35) nucleotides that is chemically-modified with one or more chemical modifications having any of Formulae I-VII or any combination thereof, wherein the linear oligonucleotide forms a hairpin structure having about 3 to about 25 (e.g., about 3, 4, 5, 6, 7, 8, 9, 10, 11, 12, 13, 14, 15, 16, 17, 18, 19, 20, 21, 22, 23, 24, or 25) base pairs and a 5′-terminal phosphate group that can be chemically modified as described herein (for example a 5′-terminal phosphate group having Formula IV). In another embodiment, a linear hairpin siNA molecule of the invention contains a stem loop motif, wherein the loop portion of the siNA molecule is biodegradable. In one embodiment, a linear hairpin siNA molecule of the invention comprises a loop portion comprising a non-nucleotide linker.

[0090] In another embodiment, a siNA molecule of the invention comprises an asymmetric hairpin structure, wherein the siNA is about 25 to about 50 (e.g., about 25, 26, 27, 28, 29, 30, 31, 32, 33, 34, 35, 36, 37, 38, 39, 40, 41, 42, 43, 44, 45, 46, 47, 48, 49, or 50) nucleotides in length having about 3 to about 25 (e.g., about 3, 4, 5, 6, 7, 8, 9, 10, 11, 12, 13, 14, 15, 16, 17, 18, 19, 20, 21, 22, 23, 24, or 25) base pairs, and wherein the siNA can include one or more chemical modifications comprising a structure having any of Formulae I-VII or any combination thereof. For example, an exemplary chemically-modified siNA molecule of the invention comprises a linear oligonucleotide having about 25 to about 35 (e.g., about 25, 26, 27, 28, 29, 30, 31, 32, 33, 34, or 35) nucleotides that is chemically-modified with one or more chemical modifications having any of Formulae I-VII or any combination thereof, wherein the linear oligonucleotide forms an asymmetric hairpin structure having about 3 to about 25 (e.g., about 3, 4, 5, 6, 7, 8, 9, 10, 11, 12, 13, 14, 15, 16, 17, 18, 19, 20, 21, 22, 23, 24, or 25) base pairs and a 5′-terminal phosphate group that can be chemically modified as described herein (for example a 5′-terminal phosphate group having Formula IV). In one embodiment, an asymmetric hairpin siNA molecule of the invention contains a stem loop motif, wherein the loop portion of the siNA molecule is biodegradable. In another embodiment, an asymmetric hairpin siNA molecule of the invention comprises a loop portion comprising a non-nucleotide linker.

[0091] In another embodiment, a siNA molecule of the invention comprises an asymmetric double stranded structure having separate polynucleotide strands comprising sense and antisense regions, wherein the antisense region is about 15 to about 30 (e.g., about 15, 16, 17, 18, 19, 20, 21, 22, 23, 24, 25, 26, 27, 28, 29, or 30) nucleotides in length, wherein the sense region is about 3 to about 25 (e.g., about 3, 4, 5, 6, 7, 8, 9, 10, 11, 12, 13, 14, 15, 16, 17, 18, 19, 20, 21, 22, 23, 24, or 25) nucleotides in length, wherein the sense region and the antisense region have at least 3 complementary nucleotides, and wherein the siNA can include one or more chemical modifications comprising a structure having any of Formulae I-VII or any combination thereof. For example, an exemplary chemically-modified siNA molecule of the invention comprises an asymmetric double stranded structure having separate polynucleotide strands comprising sense and antisense regions, wherein the antisense region is about 18 to about 23 (e.g., about 18, 19, 20, 21, 22, or 23) nucleotides in length and wherein the sense region is about 3 to about 15 (e.g., about 3, 4, 5, 6, 7, 8, 9, 10, 11, 12, 13, 14, or 15) nucleotides in length, wherein the sense region the antisense region have at least 3 complementary nucleotides, and wherein the siNA can include one or more chemical modifications comprising a structure having any of Formulae I-VII or any combination thereof. In another embodiment, the asymmetric double stranded siNA molecule can also have a 5′-terminal phosphate group that can be chemically modified as described herein (for example a 5′-terminal phosphate group having Formula IV).

[0092] In another embodiment, a siNA molecule of the invention comprises a circular nucleic acid molecule, wherein the siNA is about 38 to about 70 (e.g., about 38, 40, 45, 50, 55, 60, 65, or 70) nucleotides in length having about 15 to about 30 (e.g., about 15, 16, 17, 18, 19, 20, 21, 22, 23, 24, 25, 26, 27, 28, 29, or 30) base pairs, and wherein the siNA can include a chemical modification, which comprises a structure having any of Formulae I-VII or any combination thereof. For example, an exemplary chemically-modified siNA molecule of the invention comprises a circular oligonucleotide having about 42 to about 50 (e.g., about 42, 43, 44, 45, 46, 47, 48, 49, or 50) nucleotides that is chemically-modified with a chemical modification having any of Formulae I-VII or any combination thereof, wherein the circular oligonucleotide forms a dumbbell shaped structure having about 19 base pairs and 2 loops.

[0093] In another embodiment, a circular siNA molecule of the invention contains two loop motifs, wherein one or both loop portions of the siNA molecule is biodegradable. For example, a circular siNA molecule of the invention is designed such that degradation of the loop portions of the siNA molecule in vivo can generate a double-stranded siNA molecule with 3′-terminal overhangs, such as 3′-terminal nucleotide overhangs comprising about 2 nucleotides.

[0094] In one embodiment, a siNA molecule of the invention comprises at least one (e.g., about 1, 2, 3, 4, 5, 6, 7, 8, 9, 10, or more) abasic moiety, for example a compound having Formula V: [chemical structure]
wherein each R3, R4, R5, R6, R7, R8, R10, R11, R12, and R13 is independently H, OH, alkyl, substituted alkyl, alkaryl or aralkyl, F, Cl, Br, CN, CF3, OCF3, OCN, O-alkyl, S-alkyl, N-alkyl, O-alkenyl, S-alkenyl, N-alkenyl, SO-alkyl, alkyl-OSH, alkyl-OH, O-alkyl-OH, O-alkyl-SH, S-alkyl-OH, S-alkyl-SH, alkyl-S-alkyl, alkyl-O-alkyl, ONO2, NO2, N3, NH2, aminoalkyl, aminoacid, aminoacyl, ONO2, O-aminoalkyl, O-aminoacid, O-aminoacyl, heterocycloalkyl, heterocycloalkaryl, aminoalkylamino, polyalklylamino, substituted silyl, or group having Formula I or II; R9 is O, S, CH2, S═O, CHF, or CF2. In one embodiment, R3 and/or R7 comprises a conjugate moiety and a linker (e.g., a nucleotide or non-nucleotide linker as described herein or otherwise known in the art). Non-limiting examples of conjugate moieties include ligands for cellular receptors, such as peptides derived from naturally occurring protein ligands; protein localization sequences, including cellular ZIP code sequences; antibodies; nucleic acid aptamers; vitamins and other co-factors, such as folate and N-acetylgalactosamine; polymers, such as polyethyleneglycol (PEG); phospholipids; cholesterol; steroids, and polyamines, such as PEI, spermine or spermidine.

[0095] In one embodiment, a siNA molecule of the invention comprises at least one (e.g., about 1, 2, 3, 4, 5, 6, 7, 8, 9, 10, or more) inverted abasic moiety, for example a compound having Formula VI: [chemical structure]
wherein each R3, R4, R5, R6, R7, R8, R10, R11, R12, and R13 is independently H, OH, alkyl, substituted alkyl, alkaryl or aralkyl, F, Cl, Br, CN, CF3, OCF3, OCN, O-alkyl, S-alkyl, N-alkyl, O-alkenyl, S-alkenyl, N-alkenyl, SO-alkyl, alkyl-OSH, alkyl-OH, O-alkyl-OH, O-alkyl-SH, S-alkyl-OH, S-alkyl-SH, alkyl-S-alkyl, alkyl-O-alkyl, ONO2, NO2, N3, NH2, aminoalkyl, aminoacid, aminoacyl, ONO2, O-aminoalkyl, O-aminoacid, O-aminoacyl, heterocycloalkyl, heterocycloalkaryl, aminoalkylamino, polyalklylamino, substituted silyl, or group having Formula I or II; R9 is O, S, CH2, S═O, CHF, or CF2, and either R2, R3, R8 or R13 serve as points of attachment to the siNA molecule of the invention. In one embodiment, R3 and/or R7 comprises a conjugate moiety and a linker (e.g., a nucleotide or non-nucleotide linker as described herein or otherwise known in the art). Non-limiting examples of conjugate moieties include ligands for cellular receptors, such as peptides derived from naturally occurring protein ligands; protein localization sequences, including cellular ZIP code sequences; antibodies; nucleic acid aptamers; vitamins and other co-factors, such as folate and N-acetylgalactosamine; polymers, such as polyethyleneglycol (PEG); phospholipids; cholesterol; steroids, and polyamines, such as PEI, spermine or spermidine.

[0096] In another embodiment, a siNA molecule of the invention comprises at least one (e.g., about 1, 2, 3, 4, 5, 6, 7, 8, 9, 10, or more) substituted polyalkyl moieties, for example a compound having Formula VII: [chemical structure]
wherein each n is independently an integer from 1 to 12, each R1, R2 and R3 is independently H, OH, alkyl, substituted alkyl, alkaryl or aralkyl, F, Cl, Br, CN, CF3, OCF3, OCN, O-alkyl, S-alkyl, N-alkyl, O-alkenyl, S-alkenyl, N-alkenyl, SO-alkyl, alkyl-OSH, alkyl-OH, O-alkyl-OH, O-alkyl-SH, S-alkyl-OH, S-alkyl-SH, alkyl-S-alkyl, alkyl-O-alkyl, ONO2, NO2, N3, NH2, aminoalkyl, aminoacid, aminoacyl, ONH2, O-aminoalkyl, O-aminoacid, O-aminoacyl, heterocycloalkyl, heterocycloalkaryl, aminoalkylamino, polyalklylamino, substituted silyl, or a group having Formula I, and R1, R2 or R3 serves as points of attachment to the siNA molecule of the invention. In one embodiment, R3 and/or R1 comprises a conjugate moiety and a linker (e.g., a nucleotide or non-nucleotide linker as described herein or otherwise known in the art). Non-limiting examples of conjugate moieties include ligands for cellular receptors, such as peptides derived from naturally occurring protein ligands; protein localization sequences, including cellular ZIP code sequences; antibodies; nucleic acid aptamers; vitamins and other co-factors, such as folate and N-acetylgalactosamine; polymers, such as polyethyleneglycol (PEG); phospholipids; cholesterol; steroids, and polyamines, such as PEI, spermine or spermidine.

[0097] By “ZIP code” sequences is meant, any peptide or protein sequence that is involved in cellular topogenic signaling mediated transport (see for example Ray et al., 2004, Science, 306 (1501): 1505)

[0098] In another embodiment, the invention features a compound having Formula VII, wherein R1 and R2 are hydroxyl (OH) groups, n=1, and R3 comprises O and is the point of attachment to the 3′-end, the 5′-end, or both of the 3′ and 5′-ends of one or both strands of a double-stranded siNA molecule of the invention or to a single-stranded siNA molecule of the invention. This modification is referred to herein as “glyceryl” (for example modification 6 in FIG. 10).

[0099] In another embodiment, a chemically modified nucleoside or non-nucleoside (e.g. a moiety having any of Formula V, VI or VII) of the invention is at the 3′-end, the 5′-end, or both of the 3′ and 5′-ends of a siNA molecule of the invention. For example, chemically modified nucleoside or non-nucleoside (e.g., a moiety having Formula V, VI or VII) can be present at the 3′-end, the 5′-end, or both of the 3′ and 5′-ends of the antisense strand, the sense strand, or both antisense and sense strands of the siNA molecule. In one embodiment, the chemically modified nucleoside or non-nucleoside (e.g., a moiety having Formula V, VI or VII) is present at the 5′-end and 3′-end of the sense strand and the 3′-end of the antisense strand of a double stranded siNA molecule of the invention. In one embodiment, the chemically modified nucleoside or non-nucleoside (e.g., a moiety having Formula V, VI or VII) is present at the terminal position of the 5′-end and 3′-end of the sense strand and the 3′-end of the antisense strand of a double stranded siNA molecule of the invention. In one embodiment, the chemically modified nucleoside or non-nucleoside (e.g., a moiety having Formula V, VI or VII) is present at the two terminal positions of the 5′-end and 3′-end of the sense strand and the 3′-end of the antisense strand of a double stranded siNA molecule of the invention. In one embodiment, the chemically modified nucleoside or non-nucleoside (e.g., a moiety having Formula V, VI or VII) is present at the penultimate position of the 5′-end and 3′-end of the sense strand and the 3′-end of the antisense strand of a double stranded siNA molecule of the invention. In addition, a moiety having Formula VII can be present at the 3′-end or the 5′-end of a hairpin siNA molecule as described herein.

[0100] In another embodiment, a siNA molecule of the invention comprises an abasic residue having Formula V or VI, wherein the abasic residue having Formula VI or VI is connected to the siNA construct in a 3′-3′,3′-2′,2′-3′, or 5′-5′ configuration, such as at the 3′-end, the 5′-end, or both of the 3′ and 5′-ends of one or both siNA strands.

[0101] In one embodiment, a siNA molecule of the invention comprises one or more (e.g., about 1, 2, 3, 4, 5, 6, 7, 8, 9, 10, or more) locked nucleic acid (LNA) nucleotides, for example, at the 5′-end, the 3′-end, both of the 5′ and 3′-ends, or any combination thereof, of the siNA molecule.

[0102] In one embodiment, a siNA molecule of the invention comprises one or more (e.g., about 1, 2, 3, 4, 5, 6, 7, 8, 9, 10, or more) 4′-thio nucleotides, for example, at the 5′-end, the 3′-end, both of the 5′ and 3′-ends, or any combination thereof, of the siNA molecule.

[0103] In another embodiment, a siNA molecule of the invention comprises one or more (e.g., about 1, 2, 3, 4, 5, 6, 7, 8, 9, 10, or more) acyclic nucleotides, for example, at the 5′-end, the 3′-end, both of the 5′ and 3′-ends, or any combination thereof, of the siNA molecule.

[0104] In one embodiment, the invention features a chemically-modified short interfering nucleic acid (siNA) molecule of the invention comprising a sense region, wherein any (e.g., one or more or all) pyrimidine nucleotides present in the sense region are 2′-deoxy-2′-fluoro pyrimidine nucleotides (e.g., wherein all pyrimidine nucleotides are 2′-deoxy-2′-fluoro pyrimidine nucleotides or alternately a plurality of pyrimidine nucleotides are 2′-deoxy-2′-fluoro pyrimidine nucleotides), and wherein any (e.g., one or more or all) purine nucleotides present in the sense region are 2′-deoxy purine nucleotides (e.g., wherein all purine nucleotides are 2′-deoxy purine nucleotides or alternately a plurality of purine nucleotides are 2′-deoxy purine nucleotides).

[0105] In one embodiment, the invention features a chemically-modified short interfering nucleic acid (siNA) molecule of the invention comprising a sense region, wherein any (e.g., one or more or all) pyrimidine nucleotides present in the sense region are 2′-deoxy-2′-fluoro, 4′-thio, 2′-O-trifluoromethyl, 2′-O-ethyl-trifluoromethoxy, or 2′-O-difluoromethoxy-ethoxy pyrimidine nucleotides (e.g., wherein all pyrimidine nucleotides are 2′-deoxy-2′-fluoro, 4′-thio, 2′-O-trifluoromethyl, 2′-O-ethyl-trifluoromethoxy, or 2′-O-difluoromethoxy-ethoxy pyrimidine nucleotides or alternately a plurality of pyrimidine nucleotides are 2′-deoxy-2′-fluoro, 4′-thio, 2′-O-trifluoromethyl, 2′-O-ethyl-trifluoromethoxy, or 2′-O-difluoromethoxy-ethoxy pyrimidine nucleotides), and wherein any (e.g., one or more or all) purine nucleotides present in the sense region are 2′-deoxy purine nucleotides (e.g., wherein all purine nucleotides are 2′-deoxy purine nucleotides or alternately a plurality of purine nucleotides are 2′-deoxy purine nucleotides), wherein any nucleotides comprising a 3′-terminal nucleotide overhang that are present in said sense region are 2′-deoxy nucleotides.

[0106] In one embodiment, the invention features a chemically-modified short interfering nucleic acid (siNA) molecule of the invention comprising a sense region, wherein any (e.g., one or more or all) pyrimidine nucleotides present in the sense region are 2′-deoxy-2′-fluoro, 4′-thio, 2′-O-trifluoromethyl, 2′-O-ethyl-trifluoromethoxy, or 2′-O-difluoromethoxy-ethoxy pyrimidine nucleotides (e.g., wherein all pyrimidine nucleotides are 2′-deoxy-2′-fluoro, 4′-thio, 2′-O-trifluoromethyl, 2′-O-ethyl-trifluoromethoxy, or 2′-O-difluoromethoxy-ethoxy pyrimidine nucleotides or alternately a plurality of pyrimidine nucleotides are 2′-deoxy-2′-fluoro, 4′-thio, 2′-O-trifluoromethyl, 2′-O-ethyl-trifluoromethoxy, or 2′-O-difluoromethoxy-ethoxy pyrimidine nucleotides), and wherein any (e.g., one or more or all) purine nucleotides present in the sense region are 2′-O-methyl purine nucleotides (e.g., wherein all purine nucleotides are 2′-O-methyl, 4′-thio, 2′-O-trifluoromethyl, 2′-O-ethyl-trifluoromethoxy, or 2′-O-difluoromethoxy-ethoxy purine nucleotides or alternately a plurality of purine nucleotides are 2′-O-methyl, 4′-thio, 2′-O-trifluoromethyl, 2′-O-ethyl-trifluoromethoxy, or 2′-O-difluoromethoxy-ethoxy purine nucleotides).

[0107] In one embodiment, the invention features a chemically-modified short interfering nucleic acid (siNA) molecule of the invention comprising a sense region, wherein any (e.g., one or more or all) pyrimidine nucleotides present in the sense region are 2′-deoxy-2′-fluoro, 4′-thio, 2′-O-trifluoromethyl, 2′-O-ethyl-trifluoromethoxy, or 2′-O-difluoromethoxy-ethoxy pyrimidine nucleotides (e.g., wherein all pyrimidine nucleotides are 2′-deoxy-2′-fluoro, 4′-thio, 2′-O-trifluoromethyl, 2′-O-ethyl-trifluoromethoxy, or 2′-O-difluoromethoxy-ethoxy pyrimidine nucleotides or alternately a plurality of pyrimidine nucleotides are 2′-deoxy-2′-fluoro, 4′-thio, 2′-O-trifluoromethyl, 2′-O-ethyl-trifluoromethoxy, or 2′-O-difluoromethoxy-ethoxy pyrimidine nucleotides), wherein any (e.g., one or more or all) purine nucleotides present in the sense region are 2′-O-methyl, 4′-thio, 2′-O-trifluoromethyl, 2′-O-ethyl-trifluoromethoxy, or 2′-O-difluoromethoxy-ethoxy purine nucleotides (e.g., wherein all purine nucleotides are 2′-O-methyl, 4′-thio, 2′-O-trifluoromethyl, 2′-O-ethyl-trifluoromethoxy, or 2′-O-difluoromethoxy-ethoxy purine nucleotides or alternately a plurality of purine nucleotides are 2′-O-methyl, 4′-thio, 2′-O-trifluoromethyl, 2′-O-ethyl-trifluoromethoxy, or 2′-O-difluoromethoxy-ethoxy purine nucleotides), and wherein any nucleotides comprising a 3′-terminal nucleotide overhang that are present in said sense region are 2′-deoxy nucleotides.

[0108] In one embodiment, the invention features a chemically-modified short interfering nucleic acid (siNA) molecule of the invention comprising an antisense region, wherein any (e.g., one or more or all) pyrimidine nucleotides present in the antisense region are 2′-deoxy-2′-fluoro, 4′-thio, 2′-O-trifluoromethyl, 2′-O-ethyl-trifluoromethoxy, or 2′-O-difluoromethoxy-ethoxy pyrimidine nucleotides (e.g., wherein all pyrimidine nucleotides are 2′-deoxy-2′-fluoro, 4′-thio, 2′-O-trifluoromethyl, 2′-O-ethyl-trifluoromethoxy, or 2′-O-difluoromethoxy-ethoxy pyrimidine nucleotides or alternately a plurality of pyrimidine nucleotides are 2′-deoxy-2′-fluoro, 4′-thio, 2′-O-trifluoromethyl, 2′-O-ethyl-trifluoromethoxy, or 2′-O-difluoromethoxy-ethoxy pyrimidine nucleotides), and wherein any (e.g., one or more or all) purine nucleotides present in the antisense region are 2′-O-methyl, 4′-thio, 2′-O-trifluoromethyl, 2′-O-ethyl-trifluoromethoxy, or 2′-O-difluoromethoxy-ethoxy purine nucleotides (e.g., wherein all purine nucleotides are 2′-O-methyl, 4′-thio, 2′-O-trifluoromethyl, 2′-O-ethyl-trifluoromethoxy, or 2′-O-difluoromethoxy-ethoxy purine nucleotides or alternately a plurality of purine nucleotides are 2′-O-methyl, 4′-thio, 2′-O-trifluoromethyl, 2′-O-ethyl-trifluoromethoxy, or 2′-O-difluoromethoxy-ethoxy purine nucleotides).

[0109] In one embodiment, the invention features a chemically-modified short interfering nucleic acid (siNA) molecule of the invention comprising an antisense region, wherein any (e.g., one or more or all) pyrimidine nucleotides present in the antisense region are 2′-deoxy-2′-fluoro, 4′-thio, 2′-O-trifluoromethyl, 2′-O-ethyl-trifluoromethoxy, or 2′-O-difluoromethoxy-ethoxy pyrimidine nucleotides (e.g., wherein all pyrimidine nucleotides are 2′-deoxy-2′-fluoro, 4′-thio, 2′-O-trifluoromethyl, 2′-O-ethyl-trifluoromethoxy, or 2′-O-difluoromethoxy-ethoxy pyrimidine nucleotides or alternately a plurality of pyrimidine nucleotides are 2′-deoxy-2′-fluoro, 4′-thio, 2′-O-trifluoromethyl, 2′-O-ethyl-trifluoromethoxy, or 2′-O-difluoromethoxy-ethoxy pyrimidine nucleotides), wherein any (e.g., one or more or all) purine nucleotides present in the antisense region are 2′-O-methyl, 4′-thio, 2′-O-trifluoromethyl, 2′-O-ethyl-trifluoromethoxy, or 2′-O-difluoromethoxy-ethoxy purine nucleotides (e.g., wherein all purine nucleotides are 2′-O-methyl, 4′-thio, 2′-O-trifluoromethyl, 2′-O-ethyl-trifluoromethoxy, or 2′-O-difluoromethoxy-ethoxy purine nucleotides or alternately a plurality of purine nucleotides are 2′-O-methyl, 4′-thio, 2′-O-trifluoromethyl, 2′-O-ethyl-trifluoromethoxy, or 2′-O-difluoromethoxy-ethoxy purine nucleotides), and wherein any nucleotides comprising a 3′-terminal nucleotide overhang that are present in said antisense region are 2′-deoxy nucleotides.

[0110] In one embodiment, the invention features a chemically-modified short interfering nucleic acid (siNA) molecule of the invention comprising an antisense region, wherein any (e.g., one or more or all) pyrimidine nucleotides present in the antisense region are 2′-deoxy-2′-fluoro, 4′-thio, 2′-O-trifluoromethyl, 2′-O-ethyl-trifluoromethoxy, or 2′-O-difluoromethoxy-ethoxy pyrimidine nucleotides (e.g., wherein all pyrimidine nucleotides are 2′-deoxy-2′-fluoro, 4′-thio, 2′-O-trifluoromethyl, 2′-O-ethyl-trifluoromethoxy, or 2′-O-difluoromethoxy-ethoxy pyrimidine nucleotides or alternately a plurality of pyrimidine nucleotides are 2′-deoxy-2′-fluoro, 4′-thio, 2′-O-trifluoromethyl, 2′-O-ethyl-trifluoromethoxy, or 2′-O-difluoromethoxy-ethoxy pyrimidine nucleotides), and wherein any (e.g., one or more or all) purine nucleotides present in the antisense region are 2′-deoxy purine nucleotides (e.g., wherein all purine nucleotides are 2′-deoxy purine nucleotides or alternately a plurality of purine nucleotides are 2′-deoxy purine nucleotides).

[0111] In one embodiment, the invention features a chemically-modified short interfering nucleic acid (siNA) molecule of the invention comprising an antisense region, wherein any (e.g., one or more or all) pyrimidine nucleotides present in the antisense region are 2′-deoxy-2′-fluoro, 4′-thio, 2′-O-trifluoromethyl, 2′-O-ethyl-trifluoromethoxy, or 2′-O-difluoromethoxy-ethoxy pyrimidine nucleotides (e.g., wherein all pyrimidine nucleotides are 2′-deoxy-2′-fluoro, 4′-thio, 2′-O-trifluoromethyl, 2′-O-ethyl-trifluoromethoxy, or 2′-O-difluoromethoxy-ethoxy pyrimidine nucleotides or alternately a plurality of pyrimidine nucleotides are 2′-deoxy-2′-fluoro, 4′-thio, 2′-O-trifluoromethyl, 2′-O-ethyl-trifluoromethoxy, or 2′-O-difluoromethoxy-ethoxy pyrimidine nucleotides), and wherein any (e.g., one or more or all) purine nucleotides present in the antisense region are 2′-O-methyl, 4′-thio, 2′-O-trifluoromethyl, 2′-O-ethyl-trifluoromethoxy, or 2′-O-difluoromethoxy-ethoxy purine nucleotides (e.g., wherein all purine nucleotides are 2′-O-methyl, 4′-thio, 2′-O-trifluoromethyl, 2′-O-ethyl-trifluoromethoxy, or 2′-O-difluoromethoxy-ethoxy purine nucleotides or alternately a plurality of purine nucleotides are 2′-O-methyl, 4′-thio, 2′-O-trifluoromethyl, 2′-O-ethyl-trifluoromethoxy, or 2′-O-difluoromethoxy-ethoxy purine nucleotides).

[0112] In one embodiment, the invention features a chemically-modified short interfering nucleic acid (siNA) molecule of the invention capable of mediating RNA interference (RNAi) against repeat expansion (RE) inside a cell or reconstituted in vitro system comprising a sense region, wherein one or more pyrimidine nucleotides present in the sense region are 2′-deoxy-2′-fluoro, 4′-thio, 2′-O-trifluoromethyl, 2′-O-ethyl-trifluoromethoxy, or 2′-O-difluoromethoxy-ethoxy pyrimidine nucleotides (e.g., wherein all pyrimidine nucleotides are 2′-deoxy-2′-fluoro, 4′-thio, 2′-O-trifluoromethyl, 2′-O-ethyl-trifluoromethoxy, or 2′-O-difluoromethoxy-ethoxy pyrimidine nucleotides or alternately a plurality of pyrimidine nucleotides are 2′-deoxy-2′-fluoro, 4′-thio, 2′-O-trifluoromethyl, 2′-O-ethyl-trifluoromethoxy, or 2′-O-difluoromethoxy-ethoxy pyrimidine nucleotides), and one or more purine nucleotides present in the sense region are 2′-deoxy purine nucleotides (e.g., wherein all purine nucleotides are 2′-deoxy purine nucleotides or alternately a plurality of purine nucleotides are 2′-deoxy purine nucleotides), and an antisense region, wherein one or more pyrimidine nucleotides present in the antisense region are 2′-deoxy-2′-fluoro, 4′-thio, 2′-O-trifluoromethyl, 2′-O-ethyl-trifluoromethoxy, or 2′-O-difluoromethoxy-ethoxy pyrimidine nucleotides (e.g., wherein all pyrimidine nucleotides are 2′-deoxy-2′-fluoro, 4′-thio, 2′-O-trifluoromethyl, 2′-O-ethyl-trifluoromethoxy, or 2′-O-difluoromethoxy-ethoxy pyrimidine nucleotides or alternately a plurality of pyrimidine nucleotides are 2′-deoxy-2′-fluoro, 4′-thio, 2′-O-trifluoromethyl, 2′-O-ethyl-trifluoromethoxy, or 2′-O-difluoromethoxy-ethoxy pyrimidine nucleotides), and one or more purine nucleotides present in the antisense region are 2′-O-methyl, 4′-thio, 2′-O-trifluoromethyl, 2′-O-ethyl-trifluoromethoxy, or 2′-O-difluoromethoxy-ethoxy purine nucleotides (e.g., wherein all purine nucleotides are 2′-O-methyl, 4′-thio, 2′-O-trifluoromethyl, 2′-O-ethyl-trifluoromethoxy, or 2′-O-difluoromethoxy-ethoxy purine nucleotides or alternately a plurality of purine nucleotides are 2′-O-methyl, 4′-thio, 2′-O-trifluoromethyl, 2′-O-ethyl-trifluoromethoxy, or 2′-O-difluoromethoxy-ethoxy purine nucleotides). The sense region and/or the antisense region can have a terminal cap modification, such as any modification described herein or shown in FIG. 10, that is optionally present at the 3′-end, the 5′-end, or both of the 3′ and 5′-ends of the sense and/or antisense sequence. The sense and/or antisense region can optionally further comprise a 3′-terminal nucleotide overhang having about 1 to about 4 (e.g., about 1, 2, 3, or 4) 2′-deoxynucleotides. The overhang nucleotides can further comprise one or more (e.g., about 1, 2, 3, 4 or more) phosphorothioate, phosphonoacetate, and/or thiophosphonoacetate internucleotide linkages. Non-limiting examples of these chemically-modified siNAs are shown in FIGS. 4 and 5 and Tables III and IV herein. In any of these described embodiments, the purine nucleotides present in the sense region are alternatively 2′-O-methyl, 4′-thio, 2′-O-trifluoromethyl, 2′-O-ethyl-trifluoromethoxy, or 2′-O-difluoromethoxy-ethoxy purine nucleotides (e.g., wherein all purine nucleotides are 2′-O-methyl, 4′-thio, 2′-O-trifluoromethyl, 2′-O-ethyl-trifluoromethoxy, or 2′-O-difluoromethoxy-ethoxy purine nucleotides or alternately a plurality of purine nucleotides are 2′-O-methyl, 4′-thio, 2′-O-trifluoromethyl, 2′-O-ethyl-trifluoromethoxy, or 2′-O-difluoromethoxy-ethoxy purine nucleotides) and one or more purine nucleotides present in the antisense region are 2′-O-methyl, 4′-thio, 2′-O-trifluoromethyl, 2′-O-ethyl-trifluoromethoxy, or 2′-O-difluoromethoxy-ethoxy purine nucleotides (e.g., wherein all purine nucleotides are 2′-O-methyl, 4′-thio, 2′-O-trifluoromethyl, 2′-O-ethyl-trifluoromethoxy, or 2′-O-difluoromethoxy-ethoxy purine nucleotides or alternately a plurality of purine nucleotides are 2′-O-methyl, 4′-thio, 2′-O-trifluoromethyl, 2′-O-ethyl-trifluoromethoxy, or 2′-O-difluoromethoxy-ethoxy purine nucleotides). Also, in any of these embodiments, one or more purine nucleotides present in the sense region are alternatively purine ribonucleotides (e.g., wherein all purine nucleotides are purine ribonucleotides or alternately a plurality of purine nucleotides are purine ribonucleotides) and any purine nucleotides present in the antisense region are 2′-O-methyl, 4′-thio, 2′-O-trifluoromethyl, 2′-O-ethyl-trifluoromethoxy, or 2′-O-difluoromethoxy-ethoxy purine nucleotides (e.g., wherein all purine nucleotides are 2′-O-methyl, 4′-thio, 2′-O-trifluoromethyl, 2′-O-ethyl-trifluoromethoxy, or 2′-O-difluoromethoxy-ethoxy purine nucleotides or alternately a plurality of purine nucleotides are 2′-O-methyl, 4′-thio, 2′-O-trifluoromethyl, 2′-O-ethyl-trifluoromethoxy, or 2′-O-difluoromethoxy-ethoxy purine nucleotides). Additionally, in any of these embodiments, one or more purine nucleotides present in the sense region and/or present in the antisense region are alternatively selected from the group consisting of 2′-deoxy nucleotides, locked nucleic acid (LNA) nucleotides, 2′-methoxyethyl nucleotides, 4′-thionucleotides, 2′-O-trifluoromethyl nucleotides, 2′-O-ethyl-trifluoromethoxy nucleotides, 2′-O-difluoromethoxy-ethoxy nucleotides and 2′-O-methyl nucleotides (e.g., wherein all purine nucleotides are selected from the group consisting of 2′-deoxy nucleotides, locked nucleic acid (LNA) nucleotides, 2′-methoxyethyl nucleotides, 4′-thionucleotides, 2′-O-trifluoromethyl nucleotides, 2′-O-ethyl-trifluoromethoxy nucleotides, 2′-O-difluoromethoxy-ethoxy nucleotides and 2′-O-methyl nucleotides or alternately a plurality of purine nucleotides are selected from the group consisting of 2′-deoxy nucleotides, locked nucleic acid (LNA) nucleotides, 2′-methoxyethyl nucleotides, 4′-thionucleotides, 2′-O-trifluoromethyl nucleotides, 2′-O-ethyl-trifluoromethoxy nucleotides, 2′-O-difluoromethoxy-ethoxy nucleotides and 2′-O-methyl nucleotides).

[0113] In another embodiment, any modified nucleotides present in the siNA molecules of the invention, preferably in the antisense strand of the siNA molecules of the invention, but also optionally in the sense and/or both antisense and sense strands, comprise modified nucleotides having properties or characteristics similar to naturally occurring ribonucleotides. For example, the invention features siNA molecules including modified nucleotides having a Northern conformation (e.g., Northern pseudorotation cycle, see for example Saenger, Principles of Nucleic Acid Structure, Springer-Verlag ed., 1984). As such, chemically modified nucleotides present in the siNA molecules of the invention, preferably in the antisense strand of the siNA molecules of the invention, but also optionally in the sense and/or both antisense and sense strands, are resistant to nuclease degradation while at the same time maintaining the capacity to mediate RNAi. Non-limiting examples of nucleotides having a northern configuration include locked nucleic acid (LNA) nucleotides (e.g., 2′-O, 4′-C-methylene-(D-ribofuranosyl) nucleotides); 2′-methoxyethoxy (MOE) nucleotides; 2′-methyl-thio-ethyl, 2′-deoxy-2′-fluoro nucleotides, 2′-deoxy-2′-chloro nucleotides, 2′-azido nucleotides, 2′-O-trifluoromethyl nucleotides, 2′-O-ethyl-trifluoromethoxy nucleotides, 2′-O-difluoromethoxy-ethoxy nucleotides, 4′-thio nucleotides and 2′-O-methyl nucleotides.

[0114] In one embodiment, the sense strand of a double stranded siNA molecule of the invention comprises a terminal cap moiety, (see for example FIG. 10) such as an inverted deoxyabaisc moiety, at the 3′-end, 5′-end, or both 3′ and 5′-ends of the sense strand.

[0115] In one embodiment, the invention features a chemically-modified short interfering nucleic acid molecule (siNA) capable of mediating RNA interference (RNAi) against repeat expansion (RE) inside a cell or reconstituted in vitro system, wherein the chemical modification comprises a conjugate covalently attached to the chemically-modified siNA molecule. Non-limiting examples of conjugates contemplated by the invention include conjugates and ligands described in Vargeese et al., U.S. Ser. No. 10/427,160, filed Apr. 30, 2003, incorporated by reference herein in its entirety, including the drawings. In another embodiment, the conjugate is covalently attached to the chemically-modified siNA molecule via a biodegradable linker. In one embodiment, the conjugate molecule is attached at the 3′-end of either the sense strand, the antisense strand, or both strands of the chemically-modified siNA molecule. In another embodiment, the conjugate molecule is attached at the 5′-end of either the sense strand, the antisense strand, or both strands of the chemically-modified siNA molecule. In yet another embodiment, the conjugate molecule is attached both the 3′-end and 5′-end of either the sense strand, the antisense strand, or both strands of the chemically-modified siNA molecule, or any combination thereof. In one embodiment, a conjugate molecule of the invention comprises a molecule that facilitates delivery of a chemically-modified siNA molecule into a biological system, such as a cell. In another embodiment, the conjugate molecule attached to the chemically-modified siNA molecule is a ligand for a cellular receptor, such as peptides derived from naturally occurring protein ligands; protein localization sequences, including cellular ZIP code sequences; antibodies; nucleic acid aptamers; vitamins and other co-factors, such as folate and N-acetylgalactosamine; polymers, such as polyethyleneglycol (PEG); phospholipids; cholesterol; steroids, and polyamines, such as PEI, spermine or spermidine. Examples of specific conjugate molecules contemplated by the instant invention that can be attached to chemically-modified siNA molecules are described in Vargeese et al., U.S. Ser. No. 10/201,394, filed Jul. 22, 2002 incorporated by reference herein. The type of conjugates used and the extent of conjugation of siNA molecules of the invention can be evaluated for improved pharmacokinetic profiles, bioavailability, and/or stability of siNA constructs while at the same time maintaining the ability of the siNA to mediate RNAi activity. As such, one skilled in the art can screen siNA constructs that are modified with various conjugates to determine whether the siNA conjugate complex possesses improved properties while maintaining the ability to mediate RNAi, for example in animal models as are generally known in the art.

[0116] In one embodiment, the invention features a short interfering nucleic acid (siNA) molecule of the invention, wherein the siNA further comprises a nucleotide, non-nucleotide, or mixed nucleotide/non-nucleotide linker that joins the sense region of the siNA to the antisense region of the siNA. In one embodiment, a nucleotide, non-nucleotide, or mixed nucleotide/non-nucleotide linker is used, for example, to attach a conjugate moiety to the siNA. In one embodiment, a nucleotide linker of the invention can be a linker of >2 nucleotides in length, for example about 3, 4, 5, 6, 7, 8, 9, or 10 nucleotides in length. In another embodiment, the nucleotide linker can be a nucleic acid aptamer. By “aptamer” or “nucleic acid aptamer” as used herein is meant a nucleic acid molecule that binds specifically to a target molecule wherein the nucleic acid molecule has sequence that comprises a sequence recognized by the target molecule in its natural setting. Alternately, an aptamer can be a nucleic acid molecule that binds to a target molecule where the target molecule does not naturally bind to a nucleic acid. The target molecule can be any molecule of interest. For example, the aptamer can be used to bind to a ligand-binding domain of a protein, thereby preventing interaction of the naturally occurring ligand with the protein. This is a non-limiting example and those in the art will recognize that other embodiments can be readily generated using techniques generally known in the art. (See, for example, Gold et al., 1995, Annu. Rev. Biochem., 64, 763; Brody and Gold, 2000, J. Biotechnol., 74, 5; Sun, 2000, Curr. Opin. Mol. Ther., 2, 100; Kusser, 2000, J. Biotechnol., 74, 27; Hermann and Patel, 2000, Science, 287, 820; and Jayasena, 1999, Clinical Chemistry, 45, 1628.)

[0117] In yet another embodiment, a non-nucleotide linker of the invention comprises abasic nucleotide, polyether, polyamine, polyamide, peptide, carbohydrate, lipid, polyhydrocarbon, or other polymeric compounds (e.g. polyethylene glycols such as those having between 2 and 100 ethylene glycol units). Specific examples include those described by Seela and Kaiser, Nucleic Acids Res. 1990, 18:6353 and Nucleic Acids Res. 1987, 15:3113; Cload and Schepartz, J. Am. Chem. Soc. 1991, 113:6324; Richardson and Schepartz, J. Am. Chem. Soc. 1991, 113:5109; Ma et al., Nucleic Acids Res. 1993, 21:2585 and Biochemistry 1993, 32:1751; Durand et al., Nucleic Acids Res. 1990, 18:6353; McCurdy et al., Nucleosides & Nucleotides 1991, 10:287; Jschke et al., Tetrahedron Lett. 1993, 34:301; Ono et al., Biochemistry 1991, 30:9914; Arnold et al., International Publication No. WO 89/02439; Usman et al., International Publication No. WO 95/06731; Dudycz et al., International Publication No. WO 95/11910 and Ferentz and Verdine, J. Am. Chem. Soc. 1991, 113:4000, all hereby incorporated by reference herein. A “non-nucleotide” further means any group or compound that can be incorporated into a nucleic acid chain in the place of one or more nucleotide units, including either sugar and/or phosphate substitutions, and allows the remaining bases to exhibit their enzymatic activity. The group or compound can be abasic in that it does not contain a commonly recognized nucleotide base, such as adenosine, guanine, cytosine, uracil or thymine, for example at the C1 position of the sugar.

[0118] In one embodiment, the invention features a short interfering nucleic acid (siNA) molecule capable of mediating RNA interference (RNAi) inside a cell or reconstituted in vitro system, wherein one or both strands of the siNA molecule that are assembled from two separate oligonucleotides do not comprise any ribonucleotides. For example, a siNA molecule can be assembled from a single oligonculeotide where the sense and antisense regions of the siNA comprise separate oligonucleotides that do not have any ribonucleotides (e.g., nucleotides having a 2′-OH group) present in the oligonucleotides. In another example, a siNA molecule can be assembled from a single oligonculeotide where the sense and antisense regions of the siNA are linked or circularized by a nucleotide or non-nucleotide linker as described herein, wherein the oligonucleotide does not have any ribonucleotides (e.g., nucleotides having a 2′-OH group) present in the oligonucleotide. Applicant has surprisingly found that the presense of ribonucleotides (e.g., nucleotides having a 2′-hydroxyl group) within the siNA molecule is not required or essential to support RNAi activity. As such, in one embodiment, all positions within the siNA can include chemically modified nucleotides and/or non-nucleotides such as nucleotides and or non-nucleotides having Formula I, II, III, IV, V, VI, or VII or any combination thereof to the extent that the ability of the siNA molecule to support RNAi activity in a cell is maintained.

[0119] In one embodiment, a siNA molecule of the invention is a single stranded siNA molecule that mediates RNAi activity in a cell or reconstituted in vitro system comprising a single stranded polynucleotide having complementarity to a target nucleic acid sequence. In another embodiment, the single stranded siNA molecule of the invention comprises a 5′-terminal phosphate group. In another embodiment, the single stranded siNA molecule of the invention comprises a 5′-terminal phosphate group and a 3′-terminal phosphate group (e.g., a 2′,3′-cyclic phosphate). In another embodiment, the single stranded siNA molecule of the invention comprises about 15 to about 30 (e.g., about 15, 16, 17, 18, 19, 20, 21, 22, 23, 24, 25, 26, 27, 28, 29, or 30) nucleotides. In yet another embodiment, the single stranded siNA molecule of the invention comprises one or more chemically modified nucleotides or non-nucleotides described herein. For example, all the positions within the siNA molecule can include chemically-modified nucleotides such as nucleotides having any of Formulae I-VII, or any combination thereof to the extent that the ability of the siNA molecule to support RNAi activity in a cell is maintained.

[0120] In one embodiment, a siNA molecule of the invention is a single stranded siNA molecule that mediates RNAi activity in a cell or reconstituted in vitro system comprising a single stranded polynucleotide having complementarity to a target nucleic acid sequence, wherein one or more pyrimidine nucleotides present in the siNA are 2′-deoxy-2′-fluoro, 4′-thio, 2′-O-trifluoromethyl, 2′-O-ethyl-trifluoromethoxy, or 2′-O-difluoromethoxy-ethoxy pyrimidine nucleotides (e.g., wherein all pyrimidine nucleotides are 2′-deoxy-2′-fluoro, 4′-thio, 2′-O-trifluoromethyl, 2′-O-ethyl-trifluoromethoxy, or 2′-O-difluoromethoxy-ethoxy pyrimidine nucleotides or alternately a plurality of pyrimidine nucleotides are 2′-deoxy-2′-fluoro, 4′-thio, 2′-O-trifluoromethyl, 2′-O-ethyl-trifluoromethoxy, or 2′-O-difluoromethoxy-ethoxy pyrimidine nucleotides), and wherein any purine nucleotides present in the antisense region are 2′-O-methyl, 4′-thio, 2′-O-trifluoromethyl, 2′-O-ethyl-trifluoromethoxy, or 2′-O-difluoromethoxy-ethoxy purine nucleotides (e.g., wherein all purine nucleotides are 2′-O-methyl, 4′-thio, 2′-O-trifluoromethyl, 2′-O-ethyl-trifluoromethoxy, or 2′-O-difluoromethoxy-ethoxy purine nucleotides or alternately a plurality of purine nucleotides are 2′-O-methyl, 4′-thio, 2′-O-trifluoromethyl, 2′-O-ethyl-trifluoromethoxy, or 2′-O-difluoromethoxy-ethoxy purine nucleotides), and a terminal cap modification, such as any modification described herein or shown in FIG. 10, that is optionally present at the 3′-end, the 5′-end, or both of the 3′ and 5′-ends of the antisense sequence. The siNA optionally further comprises about 1 to about 4 or more (e.g., about 1, 2, 3, 4 or more) terminal 2′-deoxynucleotides at the 3′-end of the siNA molecule, wherein the terminal nucleotides can further comprise one or more (e.g., 1, 2, 3, 4 or more) phosphorothioate, phosphonoacetate, and/or thiophosphonoacetate internucleotide linkages, and wherein the siNA optionally further comprises a terminal phosphate group, such as a 5′-terminal phosphate group. In any of these embodiments, any purine nucleotides present in the antisense region are alternatively 2′-deoxy purine nucleotides (e.g., wherein all purine nucleotides are 2′-deoxy purine nucleotides or alternately a plurality of purine nucleotides are 2′-deoxy purine nucleotides). Also, in any of these embodiments, any purine nucleotides present in the siNA (i.e., purine nucleotides present in the sense and/or antisense region) can alternatively be locked nucleic acid (LNA) nucleotides (e.g., wherein all purine nucleotides are LNA nucleotides or alternately a plurality of purine nucleotides are LNA nucleotides). Also, in any of these embodiments, any purine nucleotides present in the siNA are alternatively 2′-methoxyethyl purine nucleotides (e.g., wherein all purine nucleotides are 2′-methoxyethyl purine nucleotides or alternately a plurality of purine nucleotides are 2′-methoxyethyl purine nucleotides). In another embodiment, any modified nucleotides present in the single stranded siNA molecules of the invention comprise modified nucleotides having properties or characteristics similar to naturally occurring ribonucleotides. For example, the invention features siNA molecules including modified nucleotides having a Northern conformation (e.g., Northern pseudorotation cycle, see for example Saenger, Principles of Nucleic Acid Structure, Springer-Verlag ed., 1984). As such, chemically modified nucleotides present in the single stranded siNA molecules of the invention are preferably resistant to nuclease degradation while at the same time maintaining the capacity to mediate RNAi.

[0121] In one embodiment, a siNA molecule of the invention comprises chemically modified nucleotides or non-nucleotides (e.g., having any of Formulae I-VII, such as 2′-deoxy, 2′-deoxy-2′-fluoro, 4′-thio, 2′-O-trifluoromethyl, 2′-O-ethyl-trifluoromethoxy, 2′-O-difluoromethoxy-ethoxy or 2′-O-methyl nucleotides) at alternating positions within one or more strands or regions of the siNA molecule. For example, such chemical modifications can be introduced at every other position of a RNA based siNA molecule, starting at either the first or second nucleotide from the 3′-end or 5′-end of the siNA. In a non-limiting example, a double stranded siNA molecule of the invention in which each strand of the siNA is 21 nucleotides in length is featured wherein positions 1, 3, 5, 7, 9, 11, 13, 15, 17, 19 and 21 of each strand are chemically modified (e.g., with compounds having any of Formulae I-VII, such as such as 2′-deoxy, 2′-deoxy-2′-fluoro, 4′-thio, 2′-O-trifluoromethyl, 2′-O-ethyl-trifluoromethoxy, 2′-O-difluoromethoxy-ethoxy or 2′-O-methyl nucleotides). In another non-limiting example, a double stranded siNA molecule of the invention in which each strand of the siNA is 21 nucleotides in length is featured wherein positions 2, 4, 6, 8, 10, 12, 14, 16, 18, and 20 of each strand are chemically modified (e.g., with compounds having any of Formulae I-VII, such as such as 2′-deoxy, 2′-deoxy-2′-fluoro, 4′-thio, 2′-O-trifluoromethyl, 2′-O-ethyl-trifluoromethoxy, 2′-O-difluoromethoxy-ethoxy or 2′-O-methyl nucleotides). Such siNA molecules can further comprise terminal cap moieties and/or backbone modifications as described herein.

[0122] In one embodiment, the invention features a method for modulating the expression of a repeat expansion (RE) gene within a cell comprising: (a) synthesizing a siNA molecule of the invention, which can be chemically-modified or unmodified, wherein one of the siNA strands comprises a sequence complementary to RNA of the repeat expansion (RE) gene; and (b) introducing the siNA molecule into a cell under conditions suitable to modulate (e.g., inhibit) the expression of the repeat expansion (RE) gene in the cell.

[0123] In one embodiment, the invention features a method for modulating the expression of a repeat expansion (RE) gene within a cell comprising: (a) synthesizing a siNA molecule of the invention, which can be chemically-modified or unmodified, wherein one of the siNA strands comprises a sequence complementary to RNA of the repeat expansion (RE) gene and wherein the sense strand sequence of the siNA comprises a sequence identical or substantially similar to the sequence of the target RNA; and (b) introducing the siNA molecule into a cell under conditions suitable to modulate (e.g., inhibit) the expression of the repeat expansion (RE) gene in the cell.

[0124] In another embodiment, the invention features a method for modulating the expression of more than one repeat expansion (RE) gene within a cell comprising: (a) synthesizing siNA molecules of the invention, which can be chemically-modified or unmodified, wherein one of the siNA strands comprises a sequence complementary to RNA of the repeat expansion (RE) genes; and (b) introducing the siNA molecules into a cell under conditions suitable to modulate (e.g., inhibit) the expression of the repeat expansion (RE) genes in the cell.

[0125] In another embodiment, the invention features a method for modulating the expression of two or more repeat expansion (RE) genes within a cell comprising: (a) synthesizing one or more siNA molecules of the invention, which can be chemically-modified or unmodified, wherein the siNA strands comprise sequences complementary to RNA of the repeat expansion (RE) genes and wherein the sense strand sequences of the siNAs comprise sequences identical or substantially similar to the sequences of the target RNAs; and (b) introducing the siNA molecules into a cell under conditions suitable to modulate (e.g., inhibit) the expression of the repeat expansion (RE) genes in the cell.

[0126] In another embodiment, the invention features a method for modulating the expression of more than one repeat expansion (RE) gene within a cell comprising: (a) synthesizing a siNA molecule of the invention, which can be chemically-modified or unmodified, wherein one of the siNA strands comprises a sequence complementary to RNA of the repeat expansion (RE) gene and wherein the sense strand sequence of the siNA comprises a sequence identical or substantially similar to the sequences of the target RNAs; and (b) introducing the siNA molecule into a cell under conditions suitable to modulate (e.g., inhibit) the expression of the repeat expansion (RE) genes in the cell.

[0127] In another embodiment, the invention features a method for modulating the expression of a repeat expansion (RE) gene within a cell comprising: (a) synthesizing a siNA molecule of the invention, which can be chemically-modified or unmodified, wherein one of the siNA strands comprises a sequence complementary to RNA of the repeat expansion (RE) gene, wherein the sense strand sequence of the siNA comprises a sequence identical or substantially similar to the sequences of the target RNA; and (b) introducing the siNA molecule into a cell under conditions suitable to modulate (e.g., inhibit) the expression of the repeat expansion (RE) gene in the cell.

[0128] In one embodiment, siNA molecules of the invention are used as reagents in ex vivo applications. For example, siNA reagents are introduced into tissue or cells that are transplanted into a subject for therapeutic effect. The cells and/or tissue can be derived from an organism or subject that later receives the explant, or can be derived from another organism or subject prior to transplantation. The siNA molecules can be used to modulate the expression of one or more genes in the cells or tissue, such that the cells or tissue obtain a desired phenotype or are able to perform a function when transplanted in vivo. In one embodiment, certain target cells from a patient are extracted. These extracted cells are contacted with siNAs targeting a specific nucleotide sequence within the cells under conditions suitable for uptake of the siNAs by these cells (e.g. using delivery reagents such as cationic lipids, liposomes and the like or using techniques such as electroporation to facilitate the delivery of siNAs into cells). The cells are then reintroduced back into the same patient or other patients.

[0129] In one embodiment, the invention features a method of modulating the expression of a repeat expansion (RE) gene in a tissue explant comprising: (a) synthesizing a siNA molecule of the invention, which can be chemically-modified, wherein one of the siNA strands comprises a sequence complementary to RNA of the repeat expansion (RE) gene; and (b) introducing the siNA molecule into a cell of the tissue explant derived from a particular organism under conditions suitable to modulate (e.g., inhibit) the expression of the repeat expansion (RE) gene in the tissue explant. In another embodiment, the method further comprises introducing the tissue explant back into the organism the tissue was derived from or into another organism under conditions suitable to modulate (e.g., inhibit) the expression of the repeat expansion (RE) gene in that organism.

[0130] In one embodiment, the invention features a method of modulating the expression of a repeat expansion (RE) gene in a tissue explant comprising: (a) synthesizing a siNA molecule of the invention, which can be chemically-modified, wherein one of the siNA strands comprises a sequence complementary to RNA of the repeat expansion (RE) gene and wherein the sense strand sequence of the siNA comprises a sequence identical or substantially similar to the sequence of the target RNA; and (b) introducing the siNA molecule into a cell of the tissue explant derived from a particular organism under conditions suitable to modulate (e.g., inhibit) the expression of the repeat expansion (RE) gene in the tissue explant. In another embodiment, the method further comprises introducing the tissue explant back into the organism the tissue was derived from or into another organism under conditions suitable to modulate (e.g., inhibit) the expression of the repeat expansion (RE) gene in that organism.

[0131] In another embodiment, the invention features a method of modulating the expression of more than one repeat expansion (RE) gene in a tissue explant comprising: (a) synthesizing siNA molecules of the invention, which can be chemically-modified, wherein one of the siNA strands comprises a sequence complementary to RNA of the repeat expansion (RE) genes; and (b) introducing the siNA molecules into a cell of the tissue explant derived from a particular organism under conditions suitable to modulate (e.g., inhibit) the expression of the repeat expansion (RE) genes in the tissue explant. In another embodiment, the method further comprises introducing the tissue explant back into the organism the tissue was derived from or into another organism under conditions suitable to modulate (e.g., inhibit) the expression of the repeat expansion (RE) genes in that organism.

[0132] In one embodiment, the invention features a method of modulating the expression of a repeat expansion (RE) gene in a subject or organism comprising: (a) synthesizing a siNA molecule of the invention, which can be chemically-modified, wherein one of the siNA strands comprises a sequence complementary to RNA of the repeat expansion (RE) gene; and (b) introducing the siNA molecule into the subject or organism under conditions suitable to modulate (e.g., inhibit) the expression of the repeat expansion (RE) gene in the subject or organism. The level of repeat expansion (RE) protein or RNA can be determined using various methods well-known in the art.

[0133] In another embodiment, the invention features a method of modulating the expression of more than one repeat expansion (RE) gene in a subject or organism comprising: (a) synthesizing siNA molecules of the invention, which can be chemically-modified, wherein one of the siNA strands comprises a sequence complementary to RNA of the repeat expansion (RE) genes; and (b) introducing the siNA molecules into the subject or organism under conditions suitable to modulate (e.g., inhibit) the expression of the repeat expansion (RE) genes in the subject or organism. The level of repeat expansion (RE) protein or RNA can be determined as is known in the art.

[0134] In one embodiment, the invention features a method for modulating the expression of a repeat expansion (RE) gene within a cell comprising: (a) synthesizing a siNA molecule of the invention, which can be chemically-modified, wherein the siNA comprises a single stranded sequence having complementarity to RNA of the repeat expansion (RE) gene; and (b) introducing the siNA molecule into a cell under conditions suitable to modulate (e.g., inhibit) the expression of the repeat expansion (RE) gene in the cell.

[0135] In another embodiment, the invention features a method for modulating the expression of more than one repeat expansion (RE) gene within a cell comprising: (a) synthesizing siNA molecules of the invention, which can be chemically-modified, wherein the siNA comprises a single stranded sequence having complementarity to RNA of the repeat expansion (RE) gene; and (b) contacting the cell in vitro or in vivo with the siNA molecule under conditions suitable to modulate (e.g., inhibit) the expression of the repeat expansion (RE) genes in the cell.

[0136] In one embodiment, the invention features a method of modulating the expression of a repeat expansion (RE) gene in a tissue explant (e.g., a brain, spinal cord, neuron or any other organ, tissue or cell as can be transplanted from one organism to another or back to the same organism from which the organ, tissue or cell is derived) comprising: (a) synthesizing a siNA molecule of the invention, which can be chemically-modified, wherein the siNA comprises a single stranded sequence having complementarity to RNA of the repeat expansion (RE) gene; and (b) contacting a cell of the tissue explant derived from a particular subject or organism with the siNA molecule under conditions suitable to modulate (e.g., inhibit) the expression of the repeat expansion (RE) gene in the tissue explant. In another embodiment, the method further comprises introducing the tissue explant back into the subject or organism the tissue was derived from or into another subject or organism under conditions suitable to modulate (e.g., inhibit) the expression of the repeat expansion (RE) gene in that subject or organism.

[0137] In another embodiment, the invention features a method of modulating the expression of more than one repeat expansion (RE) gene in a tissue explant (e.g., a brain, spinal cord, neuron, or any other organ, tissue or cell as can be transplanted from one organism to another or back to the same organism from which the organ, tissue or cell is derived) comprising: (a) synthesizing siNA molecules of the invention, which can be chemically-modified, wherein the siNA comprises a single stranded sequence having complementarity to RNA of the repeat expansion (RE) gene; and (b) introducing the siNA molecules into a cell of the tissue explant derived from a particular subject or organism under conditions suitable to modulate (e.g., inhibit) the expression of the repeat expansion (RE) genes in the tissue explant. In another embodiment, the method further comprises introducing the tissue explant back into the subject or organism the tissue was derived from or into another subject or organism under conditions suitable to modulate (e.g., inhibit) the expression of the repeat expansion (RE) genes in that subject or organism.

[0138] In one embodiment, the invention features a method of modulating the expression of a repeat expansion (RE) gene in a subject or organism comprising: (a) synthesizing a siNA molecule of the invention, which can be chemically-modified, wherein the siNA comprises a single stranded sequence having complementarity to RNA of the repeat expansion (RE) gene; and (b) introducing the siNA molecule into the subject or organism under conditions suitable to modulate (e.g., inhibit) the expression of the repeat expansion (RE) gene in the subject or organism.

[0139] In another embodiment, the invention features a method of modulating the expression of more than one repeat expansion (RE) gene in a subject or organism comprising: (a) synthesizing siNA molecules of the invention, which can be chemically-modified, wherein the siNA comprises a single stranded sequence having complementarity to RNA of the repeat expansion (RE) gene; and (b) introducing the siNA molecules into the subject or organism under conditions suitable to modulate (e.g., inhibit) the expression of the repeat expansion (RE) genes in the subject or organism.

[0140] In one embodiment, the invention features a method of modulating the expression of a repeat expansion (RE) gene in a subject or organism comprising contacting the subject or organism with a siNA molecule of the invention under conditions suitable to modulate (e.g., inhibit) the expression of the repeat expansion (RE) gene in the subject or organism.

[0141] In one embodiment, the invention features a method for treating or preventing Huntington's diease in a subject or organism comprising contacting the subject or organism with a siNA molecule of the invention under conditions suitable to modulate the expression of the repeat expansion (RE) gene (e.g., both mutant and wild type HD alleles, or alternately the mutant HD allele) in the subject or organism whereby the treatment or prevention of Huntington's diease can be achieved. In one embodiment, the invention features contacting the subject or organism with a siNA molecule of the invention via local administration to relevant tissues or cells, such as brain tissue or brain cells, for example cortex and striatum. In one embodiment, the invention features contacting the subject or organism with a siNA molecule of the invention via systemic administration (such as via intravenous or subcutaneous administration of siNA) to relevant tissues or cells, such as tissues or cells involved in the maintenance or development of Huntington's diease. The siNA molecule of the invention can be formulated or conjugated as described herein or otherwise known in the art to target appropriate tisssues or cells in the subject or organism.

[0142] In one embodiment, the invention features a method for treating or preventing spinocerebellar ataxia in a subject or organism comprising contacting the subject or organism with a siNA molecule of the invention under conditions suitable to modulate the expression of the repeat expansion (RE) gene (e.g., both mutant and wild type SCA alleles, such as wild type and mutant SCA1, SCA2, SCA3, SCA5, SCA7, SCA12, and SCA17, or alternately the mutant SCA allele such as mutant SCA1, SCA2, SCA3, SCA5, SCA7, SCA12, and SCA17) in the subject or organism whereby the treatment or prevention of spinocerebellar ataxia can be achieved. In one embodiment, the invention features contacting the subject or organism with a siNA molecule of the invention via local administration to relevant tissues or cells, such as CNS tissue or CNS cells, for example the spinal cord, dorsal ganglia, or cerebellum. In one embodiment, the invention features contacting the subject or organism with a siNA molecule of the invention via systemic administration (such as via intravenous or subcutaneous administration of siNA) to relevant tissues or cells, such as tissues or cells involved in the maintenance or development of spinocerebellar ataxia. The siNA molecule of the invention can be formulated or conjugated as described herein or otherwise known in the art to target appropriate tissues or cells in the subject or organism.

[0143] In one embodiment, the invention features a method for treating or preventing spinal muscular dystrophy in a subject or organism comprising contacting the subject or organism with a siNA molecule of the invention under conditions suitable to modulate the expression of the repeat expansion (RE) gene (e.g., both mutant and wild type androgen receptor (AR) locus Xq11-q12 alleles, or alternately the mutant androgen receptor (AR) locus Xq11-q12 allele) in the subject or organism whereby the treatment or prevention of spinal muscular dystrophy can be achieved. In one embodiment, the invention features contacting the subject or organism with a siNA molecule of the invention via local administration to relevant tissues or cells, such as CNS tissue or CNS cells, for example the spinal cord, dorsal ganglia, or cerebellum or PNS cells and tissue such as motor neurons. In one embodiment, the invention features contacting the subject or organism with a siNA molecule of the invention via systemic administration (such as via intravenous or subcutaneous administration of siNA) to relevant tissues or cells, such as tissues or cells involved in the maintenance or development of spinal muscular dystrophy. The siNA molecule of the invention can be formulated or conjugated as described herein or otherwise known in the art to target appropriate tisssues or cells in the subject or organism.

[0144] In one embodiment, the invention features a method for treating or preventing bulbar muscular dystrophy in a subject or organism comprising contacting the subject or organism with a siNA molecule of the invention under conditions suitable to modulate the expression of the repeat expansion (RE) gene (e.g., both mutant and wild type androgen receptor (AR) locus Xq11-q12 alleles, or alternately the mutant androgen receptor (AR) locus Xq11-q12 allele) in the subject or organism whereby the treatment or prevention of bulbar muscular dystrophy can be achieved. In one embodiment, the invention features contacting the subject or organism with a siNA molecule of the invention via local administration to relevant tissues or cells, such as CNS tissue or CNS cells, for example the spinal cord, dorsal ganglia, or cerebellum or PNS cells and tissue such as motor neurons. In one embodiment, the invention features contacting the subject or organism with a siNA molecule of the invention via systemic administration (such as via intravenous or subcutaneous administration of siNA) to relevant tissues or cells, such as tissues or cells involved in the maintenance or development of bulbar muscular dystrophy. The siNA molecule of the invention can be formulated or conjugated as described herein or otherwise known in the art to target appropriate tisssues or cells in the subject or organism.

[0145] In one embodiment, the invention features a method for treating or preventing dentatorubropallidoluysian atrophy in a subject or organism comprising contacting the subject or organism with a siNA molecule of the invention under conditions suitable to modulate the expression of the repeat expansion (RE) gene (e.g., both mutant and wild type DRPLA alleles, or alternately the mutant DRPLA allele) in the subject or organism whereby the treatment or prevention of dentatorubropallidoluysian atrophy can be achieved. In one embodiment, the invention features contacting the subject or organism with a siNA molecule of the invention via local administration to relevant tissues or cells, such as CNS tissue or CNS cells, for example the spinal cord, dorsal ganglia, or cerebellum or PNS cells and tissue such as motor neurons. In one embodiment, the invention features contacting the subject or organism with a siNA molecule of the invention via systemic administration (such as via intravenous or subcutaneous administration of siNA) to relevant tissues or cells, such as tissues or cells involved in the maintenance or development of dentatorubropallidoluysian atrophy. The siNA molecule of the invention can be formulated or conjugated as described herein or otherwise known in the art to target appropriate tisssues or cells in the subject or organism.

[0146] In any of the methods of treatment of the invention, the siNA can be administered to the subject as a course of treatment, for example administration at various time intervals, such as once per day over the course of treatment, once every two days over the course of treatment, once every three days over the course of treatment, once every four days over the course of treatment, once every five days over the course of treatment, once every six days over the course of treatment, once per week over the course of treatment, once every other week over the course of treatment, once per month over the course of treatment, etc. In one embodiment, the course of treatment is from about one to about 52 weeks or longer (e.g., indefinitely). In one embodiment, the course of treatment is from about one to about 48 months or longer (e.g., indefinitely). In the case of inner ear implants, the course of treatment may comprise one day to one month or more. In the case of inner ear surgery, the course of treatment may comprise a single administration or multiple administrations as is required

[0147] In any of the methods of treatment of the invention, the siNA can be administered to the subject systemically as described herein or otherwise known in the art. Systemic administration can include, for example, intravenous, subcutaneous, intramuscular, catheterization, nasopharangeal, transdermal, or gastrointestinal administration as is generally known in the art. In one embodiment, approaches to opening the blood brain barrier or penetrating the blood brain barrier are utilized, see for example Pardridge, 2002, Nat Rev Drug Discov. 1(2), 131-9 and Schlachetzki et al., 2004, Neurology, 62(8), 1275-81.

[0148] In one embodiment, in any of the methods of treatment or prevention of the invention, the siNA can be administered to the subject locally or to local tissues as described herein or otherwise known in the art. Local administration can include, for example, convection enhanced delivery, intrathecal administration, catheterization, implantation, direct injection, stenting, or other administration to relevant tissues, or any other local administration technique, method or procedure, as is generally known in the art.

[0149] In one embodiment, the invention features a method for administering siNA molecules and compositions of the invention to the CNS, including cortex, striatum, hippocampus, cerebellum, or spinal cord, comprising, contacting the siNA with such cells, tissues, or structures, under conditions suitable for the administration.

[0150] In one embodiment, the siNA, vector, or expression cassette is administered to the subject or organism by stereotactic or convection enhanced delivery to the brain. For example, U.S. Pat. No. 5,720,720 provides methods and devices useful for stereotactic and convection enhanced delivery of reagents to the brain. Such methods and devices can be readily used for the delivery of siNAs, vectors, or expression cassettes of the invention to a subject or organism, and is incorporated by reference herein in its entirety. U.S. Patent Application Nos. 2002/0141980; 2002/0114780; and 2002/0187127 all provide methods and devices useful for stereotactic and convection enhanced delivery of reagents that can be readily adapted for delivery of siNAs, vectors, or expression cassettes of the invention to a subject or organism, and are incorporated by reference herein in their entirety. Particular devices that may be useful in delivering siNAs, vectors, or expression cassettes of the invention to a subject or organism are for example described in U.S. Patent Application No. 2004/0162255, which is incorporated by reference herein in its entirety.

[0151] In another embodiment, the invention features a method of modulating the expression of more than one repeat expansion (RE) gene in a subject or organism comprising contacting the subject or organism with one or more siNA molecules of the invention under conditions suitable to modulate (e.g., inhibit) the expression of the repeat expansion (RE) genes in the subject or organism. In one embodiment, the repeat expansion (RE) genes, are for example, selected from the group consisting of huntingtin, SCA1, SCA2, SCA3, SCA6, SCA7, SCA12, SCA17, SBMA, or DRPLA (see for example Table I), including both mutant and wild-type alleles thereof.

[0152] The siNA molecules of the invention can be designed to down regulate or inhibit target (e.g., repeat expansion (RE)) gene expression through RNAi targeting of a variety of nucleic acid molecules. In one embodiment, the siNA molecules of the invention are used to target various DNA corresponding to a target gene, for example via heterochromatic silencing. In one embodiment, the siNA molecules of the invention are used to target various RNAs corresponding to a target gene, for example via RNA target cleavage or translational inhibition. Non-limiting examples of such RNAs include messenger RNA (mRNA), non-coding RNA or regulatory elements, alternate RNA splice variants of target gene(s), post-transcriptionally modified RNA of target gene(s), pre-mRNA of target gene(s), and/or RNA templates. If alternate splicing produces a family of transcripts that are distinguished by usage of appropriate exons, the instant invention can be used to inhibit gene expression through the appropriate exons to specifically inhibit or to distinguish among the functions of gene family members. For example, a protein that contains an alternatively spliced transmembrane domain can be expressed in both membrane bound and secreted forms. Use of the invention to target the exon containing the transmembrane domain can be used to determine the functional consequences of pharmaceutical targeting of membrane bound as opposed to the secreted form of the protein. Non-limiting examples of applications of the invention relating to targeting these RNA molecules include therapeutic pharmaceutical applications, cosmetic applications, veterinary applications, pharmaceutical discovery applications, molecular diagnostic and gene function applications, and gene mapping, for example using single nucleotide polymorphism mapping with siNA molecules of the invention. Such applications can be implemented using known gene sequences or from partial sequences available from an expressed sequence tag (EST).

[0153] In another embodiment, the siNA molecules of the invention are used to target conserved sequences corresponding to a gene family or gene families such as repeat expansion (RE) family genes, including both wild type and mutant alleles of repeat expansion genes. As such, siNA molecules targeting multiple repeat expansion (RE) targets can provide increased therapeutic effect. In one embodiment, the invention features the targeting (cleavage or inhibition of expression or function) of more than one repeat expansion (RE) gene sequence using a single siNA molecule, by targeting the conserved sequences of the targeted repeat expansion (RE) gene (e.g., sequences that are unique to the mutant allele of a repeat expansion gene).

[0154] In addition, siNA can be used to characterize pathways of gene function in a variety of applications. For example, the present invention can be used to inhibit the activity of target gene(s) in a pathway to determine the function of uncharacterized gene(s) in gene function analysis, mRNA function analysis, or translational analysis. The invention can be used to determine potential target gene pathways involved in various diseases and conditions toward pharmaceutical development. The invention can be used to understand pathways of gene expression involved in, for example, the progression and/or maintenance Huntington disease and related conditions such as progressive chorea, rigidity, dementia, and seizures, spinocerebellar ataxia, spinal and bulbar muscular dystrophy (SBMA), dentatorubropallidoluysian atrophy (DRPLA), and any other diseases or conditions that are related to or will respond to the levels of a repeat expansion (RE) protein in a cell, tissue, subject, or organism, alone or in combination with other therapies.

[0155] In one embodiment, siNA molecule(s) and/or methods of the invention are used to down regulate the expression of gene(s) that encode RNA referred to by Genbank Accession, for example, repeat expansion (RE) genes encoding RNA sequence(s) referred to herein by Genbank Accession number, for example, Genbank Accession Nos. shown in Table I.

[0156] In one embodiment, the invention features a method comprising: (a) generating a library of siNA constructs having a predetermined complexity; and (b) assaying the siNA constructs of (a) above, under conditions suitable to determine RNAi target sites within the target RNA sequence. In one embodiment, the siNA molecules of (a) have strands of a fixed length, for example, about 23 nucleotides in length. In another embodiment, the siNA molecules of (a) are of differing length, for example having strands of about 15 to about 30 (e.g., about 15, 16, 17, 18, 19, 20, 21, 22, 23, 24, 25, 26, 27, 28, 29, or 30) nucleotides in length. In one embodiment, the assay can comprise a reconstituted in vitro siNA assay as described herein. In another embodiment, the assay can comprise a cell culture system in which target RNA is expressed. In another embodiment, fragments of target RNA are analyzed for detectable levels of cleavage, for example by gel electrophoresis, northern blot analysis, or RNAse protection assays, to determine the most suitable target site(s) within the target RNA sequence. The target RNA sequence can be obtained as is known in the art, for example, by cloning and/or transcription for in vitro systems, and by cellular expression in in vivo systems.

[0157] In one embodiment, the invention features a method comprising: (a) generating a randomized library of siNA constructs having a predetermined complexity, such as of 4N, where N represents the number of base paired nucleotides in each of the siNA construct strands (eg. for a siNA construct having 21 nucleotide sense and antisense strands with 19 base pairs, the complexity would be 419); and (b) assaying the siNA constructs of (a) above, under conditions suitable to determine RNAi target sites within the target repeat expansion (RE) RNA sequence. In another embodiment, the siNA molecules of (a) have strands of a fixed length, for example about 23 nucleotides in length. In yet another embodiment, the siNA molecules of (a) are of differing length, for example having strands of about 15 to about 30 (e.g., about 15, 16, 17, 18, 19, 20, 21, 22, 23, 24, 25, 26, 27, 28, 29, or 30) nucleotides in length. In one embodiment, the assay can comprise a reconstituted in vitro siNA assay as described in Example 6 herein. In another embodiment, the assay can comprise a cell culture system in which target RNA is expressed. In another embodiment, fragments of repeat expansion (RE) RNA are analyzed for detectable levels of cleavage, for example, by gel electrophoresis, northern blot analysis, or RNAse protection assays, to determine the most suitable target site(s) within the target repeat expansion (RE) RNA sequence. The target repeat expansion (RE) RNA sequence can be obtained as is known in the art, for example, by cloning and/or transcription for in vitro systems, and by cellular expression in in vivo systems.

[0158] In another embodiment, the invention features a method comprising: (a) analyzing the sequence of a RNA target encoded by a target gene; (b) synthesizing one or more sets of siNA molecules having sequence complementary to one or more regions of the RNA of (a); and (c) assaying the siNA molecules of (b) under conditions suitable to determine RNAi targets within the target RNA sequence. In one embodiment, the siNA molecules of (b) have strands of a fixed length, for example about 23 nucleotides in length. In another embodiment, the siNA molecules of (b) are of differing length, for example having strands of about 15 to about 30 (e.g., about 15, 16, 17, 18, 19, 20, 21, 22, 23, 24, 25, 26, 27, 28, 29, or 30) nucleotides in length. In one embodiment, the assay can comprise a reconstituted in vitro siNA assay as described herein. In another embodiment, the assay can comprise a cell culture system in which target RNA is expressed. Fragments of target RNA are analyzed for detectable levels of cleavage, for example by gel electrophoresis, northern blot analysis, or RNAse protection assays, to determine the most suitable target site(s) within the target RNA sequence. The target RNA sequence can be obtained as is known in the art, for example, by cloning and/or transcription for in vitro systems, and by expression in in vivo systems.

[0159] By “target site” is meant a sequence within a target RNA that is “targeted” for cleavage mediated by a siNA construct which contains sequences within its antisense region that are complementary to the target sequence.

[0160] By “detectable level of cleavage” is meant cleavage of target RNA (and formation of cleaved product RNAs) to an extent sufficient to discern cleavage products above the background of RNAs produced by random degradation of the target RNA. Production of cleavage products from 1-5% of the target RNA is sufficient to detect above the background for most methods of detection.

[0161] In one embodiment, the invention features a composition comprising a siNA molecule of the invention, which can be chemically-modified, in a pharmaceutically acceptable carrier or diluent. In another embodiment, the invention features a pharmaceutical composition comprising siNA molecules of the invention, which can be chemically-modified, targeting one or more genes in a pharmaceutically acceptable carrier or diluent. In another embodiment, the invention features a method for diagnosing a disease, trait, or condition in a subject comprising administering to the subject a composition of the invention under conditions suitable for the diagnosis of the disease, trait, or condition in the subject. In another embodiment, the invention features a method for treating or preventing a disease, trait, or condition, such as Huntington disease, spinocerebellar ataxia, spinal and bulbar muscular dystrophy, and dentatorubropallidoluysian atrophy in a subject, comprising administering to the subject a composition of the invention under conditions suitable for the treatment or prevention of the disease, trait, or condition in the subject, alone or in conjunction with one or more other therapeutic compounds.

[0162] In another embodiment, the invention features a method for validating a repeat expansion (RE) gene target, comprising: (a) synthesizing a siNA molecule of the invention, which can be chemically-modified, wherein one of the siNA strands includes a sequence complementary to RNA of a repeat expansion (RE) target gene; (b) introducing the siNA molecule into a cell, tissue, subject, or organism under conditions suitable for modulating expression of the repeat expansion (RE) target gene in the cell, tissue, subject, or organism; and (c) determining the function of the gene by assaying for any phenotypic change in the cell, tissue, subject, or organism.

[0163] In another embodiment, the invention features a method for validating a repeat expansion (RE) target comprising: (a) synthesizing a siNA molecule of the invention, which can be chemically-modified, wherein one of the siNA strands includes a sequence complementary to RNA of a repeat expansion (RE) target gene; (b) introducing the siNA molecule into a biological system under conditions suitable for modulating expression of the repeat expansion (RE) target gene in the biological system; and (c) determining the function of the gene by assaying for any phenotypic change in the biological system.

[0164] By “biological system” is meant, material, in a purified or unpurified form, from biological sources, including but not limited to human or animal, wherein the system comprises the components required for RNAi activity. The term “biological system” includes, for example, a cell, tissue, subject, or organism, or extract thereof. The term biological system also includes reconstituted RNAi systems that can be used in an in vitro setting.

[0165] By “phenotypic change” is meant any detectable change to a cell that occurs in response to contact or treatment with a nucleic acid molecule of the invention (e.g., siNA). Such detectable changes include, but are not limited to, changes in shape, size, proliferation, motility, protein expression or RNA expression or other physical or chemical changes as can be assayed by methods known in the art. The detectable change can also include expression of reporter genes/molecules such as Green Florescent Protein (GFP) or various tags that are used to identify an expressed protein or any other cellular component that can be assayed.

[0166] In one embodiment, the invention features a kit containing a siNA molecule of the invention, which can be chemically-modified, that can be used to modulate the expression of a repeat expansion (RE) target gene in a biological system, including, for example, in a cell, tissue, subject, or organism. In another embodiment, the invention features a kit containing more than one siNA molecule of the invention, which can be chemically-modified, that can be used to modulate the expression of more than one repeat expansion (RE) target gene in a biological system, including, for example, in a cell, tissue, subject, or organism.

[0167] In one embodiment, the invention features a cell containing one or more siNA molecules of the invention, which can be chemically-modified. In another embodiment, the cell containing a siNA molecule of the invention is a mammalian cell. In yet another embodiment, the cell containing a siNA molecule of the invention is a human cell.

[0168] In one embodiment, the synthesis of a siNA molecule of the invention, which can be chemically-modified, comprises: (a) synthesis of two complementary strands of the siNA molecule; (b) annealing the two complementary strands together under conditions suitable to obtain a double-stranded siNA molecule. In another embodiment, synthesis of the two complementary strands of the siNA molecule is by solid phase oligonucleotide synthesis. In yet another embodiment, synthesis of the two complementary strands of the siNA molecule is by solid phase tandem oligonucleotide synthesis.

[0169] In one embodiment, the invention features a method for synthesizing a siNA duplex molecule comprising: (a) synthesizing a first oligonucleotide sequence strand of the siNA molecule, wherein the first oligonucleotide sequence strand comprises a cleavable linker molecule that can be used as a scaffold for the synthesis of the second oligonucleotide sequence strand of the siNA; (b) synthesizing the second oligonucleotide sequence strand of siNA on the scaffold of the first oligonucleotide sequence strand, wherein the second oligonucleotide sequence strand further comprises a chemical moiety than can be used to purify the siNA duplex; (c) cleaving the linker molecule of (a) under conditions suitable for the two siNA oligonucleotide strands to hybridize and form a stable duplex; and (d) purifying the siNA duplex utilizing the chemical moiety of the second oligonucleotide sequence strand. In one embodiment, cleavage of the linker molecule in (c) above takes place during deprotection of the oligonucleotide, for example, under hydrolysis conditions using an alkylamine base such as methylamine. In one embodiment, the method of synthesis comprises solid phase synthesis on a solid support such as controlled pore glass (CPG) or polystyrene, wherein the first sequence of (a) is synthesized on a cleavable linker, such as a succinyl linker, using the solid support as a scaffold. The cleavable linker in (a) used as a scaffold for synthesizing the second strand can comprise similar reactivity as the solid support derivatized linker, such that cleavage of the solid support derivatized linker and the cleavable linker of (a) takes place concomitantly. In another embodiment, the chemical moiety of (b) that can be used to isolate the attached oligonucleotide sequence comprises a trityl group, for example a dimethoxytrityl group, which can be employed in a trityl-on synthesis strategy as described herein. In yet another embodiment, the chemical moiety, such as a dimethoxytrityl group, is removed during purification, for example, using acidic conditions.

[0170] In a further embodiment, the method for siNA synthesis is a solution phase synthesis or hybrid phase synthesis wherein both strands of the siNA duplex are synthesized in tandem using a cleavable linker attached to the first sequence which acts a scaffold for synthesis of the second sequence. Cleavage of the linker under conditions suitable for hybridization of the separate siNA sequence strands results in formation of the double-stranded siNA molecule.

[0171] In another embodiment, the invention features a method for synthesizing a siNA duplex molecule comprising: (a) synthesizing one oligonucleotide sequence strand of the siNA molecule, wherein the sequence comprises a cleavable linker molecule that can be used as a scaffold for the synthesis of another oligonucleotide sequence; (b) synthesizing a second oligonucleotide sequence having complementarity to the first sequence strand on the scaffold of (a), wherein the second sequence comprises the other strand of the double-stranded siNA molecule and wherein the second sequence further comprises a chemical moiety than can be used to isolate the attached oligonucleotide sequence; (c) purifying the product of (b) utilizing the chemical moiety of the second oligonucleotide sequence strand under conditions suitable for isolating the full-length sequence comprising both siNA oligonucleotide strands connected by the cleavable linker and under conditions suitable for the two siNA oligonucleotide strands to hybridize and form a stable duplex. In one embodiment, cleavage of the linker molecule in (c) above takes place during deprotection of the oligonucleotide, for example, under hydrolysis conditions. In another embodiment, cleavage of the linker molecule in (c) above takes place after deprotection of the oligonucleotide. In another embodiment, the method of synthesis comprises solid phase synthesis on a solid support such as controlled pore glass (CPG) or polystyrene, wherein the first sequence of (a) is synthesized on a cleavable linker, such as a succinyl linker, using the solid support as a scaffold. The cleavable linker in (a) used as a scaffold for synthesizing the second strand can comprise similar reactivity or differing reactivity as the solid support derivatized linker, such that cleavage of the solid support derivatized linker and the cleavable linker of (a) takes place either concomitantly or sequentially. In one embodiment, the chemical moiety of (b) that can be used to isolate the attached oligonucleotide sequence comprises a trityl group, for example a dimethoxytrityl group.

[0172] In another embodiment, the invention features a method for making a double-stranded siNA molecule in a single synthetic process comprising: (a) synthesizing an oligonucleotide having a first and a second sequence, wherein the first sequence is complementary to the second sequence, and the first oligonucleotide sequence is linked to the second sequence via a cleavable linker, and wherein a terminal 5′-protecting group, for example, a 5′-O-dimethoxytrityl group (5′-O-DMT) remains on the oligonucleotide having the second sequence; (b) deprotecting the oligonucleotide whereby the deprotection results in the cleavage of the linker joining the two oligonucleotide sequences; and (c) purifying the product of (b) under conditions suitable for isolating the double-stranded siNA molecule, for example using a trityl-on synthesis strategy as described herein.

[0173] In another embodiment, the method of synthesis of siNA molecules of the invention comprises the teachings of Scaringe et al., U.S. Pat. Nos. 5,889,136; 6,008,400; and 6,111,086, incorporated by reference herein in their entirety.

[0174] In one embodiment, the invention features siNA constructs that mediate RNAi against repeat expansion (RE), wherein the siNA construct comprises one or more chemical modifications, for example, one or more chemical modifications having any of Formulae I-VII or any combination thereof that increases the nuclease resistance of the siNA construct.

[0175] In another embodiment, the invention features a method for generating siNA molecules with increased nuclease resistance comprising (a) introducing nucleotides having any of Formula I-VII or any combination thereof into a siNA molecule, and (b) assaying the siNA molecule of step (a) under conditions suitable for isolating siNA molecules having increased nuclease resistance.

[0176] In another embodiment, the invention features a method for generating siNA molecules with improved toxicologic profiles (e.g., having attenuated or no immunstimulatory properties) comprising (a) introducing nucleotides having any of Formula I-VII (e.g., siNA motifs referred to in Table IV) or any combination thereof into a siNA molecule, and (b) assaying the siNA molecule of step (a) under conditions suitable for isolating siNA molecules having improved toxicologic profiles.

[0177] In another embodiment, the invention features a method for generating siNA formulations with improved toxicologic profiles (e.g., having attenuated or no immunstimulatory properties) comprising (a) generating a siNA formulation comprising a siNA molecule of the invention and a delivery vehicle or delivery particle as described herein or as otherwise known in the art, and (b) assaying the siNA formualtion of step (a) under conditions suitable for isolating siNA formulations having improved toxicologic profiles.

[0178] In another embodiment, the invention features a method for generating siNA molecules that do not stimulate an interferon response (e.g., no interferon response or attenuated interferon response) in a cell, subject, or organism, comprising (a) introducing nucleotides having any of Formula I-VII (e.g., siNA motifs referred to in Table IV) or any combination thereof into a siNA molecule, and (b) assaying the siNA molecule of step (a) under conditions suitable for isolating siNA molecules that do not stimulate an interferon response.

[0179] In another embodiment, the invention features a method for generating siNA formulations that do not stimulate an interferon response (e.g., no interferon response or attenuated interferon response) in a cell, subject, or organism, comprising (a) generating a siNA formulation comprising a siNA molecule of the invention and a delivery vehicle or delivery particle as described herein or as otherwise known in the art, and (b) assaying the siNA formualtion of step (a) under conditions suitable for isolating siNA formulations that do not stimulate an interferon response.

[0180] By “improved toxicologic profile”, is meant that the chemically modified or formulated siNA construct exhibits decreased toxicity in a cell, subject, or organism compared to an unmodified or unformulated siNA, or siNA molecule having fewer modifications or modifications that are less effective in imparting improved toxicology. In a non-limiting example, siNA molecules and formulations with improved toxicologic profiles are associated with a decreased or attenuated immunostimulatory response in a cell, subject, or organism compared to an unmodified or unformulated siNA, or siNA molecule having fewer modifications or modifications that are less effective in imparting improved toxicology. In one embodiment, a siNA molecule or formulation with an improved toxicological profile comprises no ribonucleotides. In one embodiment, a siNA molecule or formulation with an improved toxicological profile comprises less than 5 ribonucleotides (e.g., 1, 2, 3, or 4 ribonucleotides). In one embodiment, a siNA molecule or formulation with an improved toxicological profile comprises Stab 7, Stab 8, Stab 11, Stab 12, Stab 13, Stab 16, Stab 17, Stab 18, Stab 19, Stab 20, Stab 23, Stab 24, Stab 25, Stab 26, Stab 27, Stab 28, Stab 29, Stab 30, Stab 31, Stab 32, Stab 33, Stab 34 or any combination thereof (see Table IV). Herein, numeric Stab chemistries include both 2′-fluoro and 2′-OCF3 versions of the chemistries shown in Table IV. For example, “Stab 7/8” refers to both Stab 7/8 and Stab 7F/8F etc. In one embodiment, a siNA molecule or formulation with an improved toxicological profile comprises a siNA molecule of the invention and a formulation as described in U.S. Patent Application Publication No. 20030077829, incorporated by reference herein in its entirety including the drawings. In one embodiment, the level of immunostimulatory response associated with a given siNA molecule can be measured as is known in the art, for example by determining the level of PKR/interferon response, proliferation, B-cell activation, and/or cytokine production in assays to quantitate the immunostimulatory response of particular siNA molecules (see, for example, Leifer et al., 2003, J. Immunother. 26, 313-9; and U.S. Pat. No. 5,968,909, incorporated in its entirety by reference).

[0181] In one embodiment, the invention features siNA constructs that mediate RNAi against repeat expansion (RE), wherein the siNA construct comprises one or more chemical modifications described herein that modulates the binding affinity between the sense and antisense strands of the siNA construct.

[0182] In another embodiment, the invention features a method for generating siNA molecules with increased binding affinity between the sense and antisense strands of the siNA molecule comprising (a) introducing nucleotides having any of Formula I-VII or any combination thereof into a siNA molecule, and (b) assaying the siNA molecule of step (a) under conditions suitable for isolating siNA molecules having increased binding affinity between the sense and antisense strands of the siNA molecule.

[0183] In one embodiment, the invention features siNA constructs that mediate RNAi against repeat expansion (RE), wherein the siNA construct comprises one or more chemical modifications described herein that modulates the binding affinity between the antisense strand of the siNA construct and a complementary target RNA sequence within a cell.

[0184] In one embodiment, the invention features siNA constructs that mediate RNAi against repeat expansion (RE), wherein the siNA construct comprises one or more chemical modifications described herein that modulates the binding affinity between the antisense strand of the siNA construct and a complementary target DNA sequence within a cell.

[0185] In another embodiment, the invention features a method for generating siNA molecules with increased binding affinity between the antisense strand of the siNA molecule and a complementary target RNA sequence comprising (a) introducing nucleotides having any of Formula I-VII or any combination thereof into a siNA molecule, and (b) assaying the siNA molecule of step (a) under conditions suitable for isolating siNA molecules having increased binding affinity between the antisense strand of the siNA molecule and a complementary target RNA sequence.

[0186] In another embodiment, the invention features a method for generating siNA molecules with increased binding affinity between the antisense strand of the siNA molecule and a complementary target DNA sequence comprising (a) introducing nucleotides having any of Formula I-VII or any combination thereof into a siNA molecule, and (b) assaying the siNA molecule of step (a) under conditions suitable for isolating siNA molecules having increased binding affinity between the antisense strand of the siNA molecule and a complementary target DNA sequence.

[0187] In one embodiment, the invention features siNA constructs that mediate RNAi against repeat expansion (RE), wherein the siNA construct comprises one or more chemical modifications described herein that modulate the polymerase activity of a cellular polymerase capable of generating additional endogenous siNA molecules having sequence homology to the chemically-modified siNA construct.

[0188] In another embodiment, the invention features a method for generating siNA molecules capable of mediating increased polymerase activity of a cellular polymerase capable of generating additional endogenous siNA molecules having sequence homology to a chemically-modified siNA molecule comprising (a) introducing nucleotides having any of Formula I-VII or any combination thereof into a siNA molecule, and (b) assaying the siNA molecule of step (a) under conditions suitable for isolating siNA molecules capable of mediating increased polymerase activity of a cellular polymerase capable of generating additional endogenous siNA molecules having sequence homology to the chemically-modified siNA molecule.

[0189] In one embodiment, the invention features chemically-modified siNA constructs that mediate RNAi against repeat expansion (RE) in a cell, wherein the chemical modifications do not significantly effect the interaction of siNA with a target RNA molecule, DNA molecule and/or proteins or other factors that are essential for RNAi in a manner that would decrease the efficacy of RNAi mediated by such siNA constructs.

[0190] In another embodiment, the invention features a method for generating siNA molecules with improved RNAi specificity against repeat expansion (RE) targets comprising (a) introducing nucleotides having any of Formula I-VII or any combination thereof into a siNA molecule, and (b) assaying the siNA molecule of step (a) under conditions suitable for isolating siNA molecules having improved RNAi specificity. In one embodiment, improved specificity comprises having reduced off target effects compared to an unmodified siNA molecule. For example, introduction of terminal cap moieties at the 3′-end, 5′-end, or both 3′ and 5′-ends of the sense strand or region of a siNA molecule of the invention can direct the siNA to have improved specificity by preventing the sense strand or sense region from acting as a template for RNAi activity against a corresponding target having complementarity to the sense strand or sense region.

[0191] In another embodiment, the invention features a method for generating siNA molecules with improved RNAi activity against repeat expansion (RE) comprising (a) introducing nucleotides having any of Formula I-VII or any combination thereof into a siNA molecule, and (b) assaying the siNA molecule of step (a) under conditions suitable for isolating siNA molecules having improved RNAi activity.

[0192] In yet another embodiment, the invention features a method for generating siNA molecules with improved RNAi activity against repeat expansion (RE) target RNA comprising (a) introducing nucleotides having any of Formula I-VII or any combination thereof into a siNA molecule, and (b) assaying the siNA molecule of step (a) under conditions suitable for isolating siNA molecules having improved RNAi activity against the target RNA.

[0193] In yet another embodiment, the invention features a method for generating siNA molecules with improved RNAi activity against repeat expansion (RE) target DNA comprising (a) introducing nucleotides having any of Formula I-VII or any combination thereof into a siNA molecule, and (b) assaying the siNA molecule of step (a) under conditions suitable for isolating siNA molecules having improved RNAi activity against the target DNA.

[0194] In one embodiment, the invention features siNA constructs that mediate RNAi against repeat expansion (RE), wherein the siNA construct comprises one or more chemical modifications described herein that modulates the cellular uptake of the siNA construct, such as cholesterol conjugation of the siNA.

[0195] In another embodiment, the invention features a method for generating siNA molecules against repeat expansion (RE) with improved cellular uptake comprising (a) introducing nucleotides having any of Formula I-VII or any combination thereof into a siNA molecule, and (b) assaying the siNA molecule of step (a) under conditions suitable for isolating siNA molecules having improved cellular uptake.

[0196] In one embodiment, the invention features siNA constructs that mediate RNAi against repeat expansion (RE), wherein the siNA construct comprises one or more chemical modifications described herein that increases the bioavailability of the siNA construct, for example, by attaching polymeric conjugates such as polyethyleneglycol or equivalent conjugates that improve the pharmacokinetics of the siNA construct, or by attaching conjugates that target specific tissue types or cell types in vivo. Non-limiting examples of such conjugates are described in Vargeese et al., U.S. Ser. No. 10/201,394 incorporated by reference herein.

[0197] In one embodiment, the invention features a method for generating siNA molecules of the invention with improved bioavailability comprising (a) introducing a conjugate into the structure of a siNA molecule, and (b) assaying the siNA molecule of step (a) under conditions suitable for isolating siNA molecules having improved bioavailability. Such conjugates can include ligands for cellular receptors, such as peptides derived from naturally occurring protein ligands; protein localization sequences, including cellular ZIP code sequences; antibodies; nucleic acid aptamers; vitamins and other co-factors, such as folate and N-acetylgalactosamine; polymers, such as polyethyleneglycol (PEG); phospholipids; cholesterol; cholesterol derivatives, polyamines, such as spermine or spermidine; and others.

[0198] In one embodiment, the invention features a double stranded short interfering nucleic acid (siNA) molecule that comprises a first nucleotide sequence complementary to a target RNA sequence or a portion thereof, and a second sequence having complementarity to said first sequence, wherein said second sequence is chemically modified in a manner that it can no longer act as a guide sequence for efficiently mediating RNA interference and/or be recognized by cellular proteins that facilitate RNAi. In one embodiment, the first nucleotide sequence of the siNA is chemically modified as described herein. In one embodiment, the first nucleotide sequence of the siNA is not modified (e.g., is all RNA).

[0199] In one embodiment, the invention features a double stranded short interfering nucleic acid (siNA) molecule that comprises a first nucleotide sequence complementary to a target RNA sequence or a portion thereof, and a second sequence having complementarity to said first sequence, wherein the second sequence is designed or modified in a manner that prevents its entry into the RNAi pathway as a guide sequence or as a sequence that is complementary to a target nucleic acid (e.g., RNA) sequence. In one embodiment, the first nucleotide sequence of the siNA is chemically modified as described herein. In one embodiment, the first nucleotide sequence of the siNA is not modified (e.g., is all RNA). Such design or modifications are expected to enhance the activity of siNA and/or improve the specificity of siNA molecules of the invention. These modifications are also expected to minimize any off-target effects and/or associated toxicity.

[0200] In one embodiment, the invention features a double stranded short interfering nucleic acid (siNA) molecule that comprises a first nucleotide sequence complementary to a target RNA sequence or a portion thereof, and a second sequence having complementarity to said first sequence, wherein said second sequence is incapable of acting as a guide sequence for mediating RNA interference. In one embodiment, the first nucleotide sequence of the siNA is chemically modified as described herein. In one embodiment, the first nucleotide sequence of the siNA is not modified (e.g., is all RNA).

[0201] In one embodiment, the invention features a double stranded short interfering nucleic acid (siNA) molecule that comprises a first nucleotide sequence complementary to a target RNA sequence or a portion thereof, and a second sequence having complementarity to said first sequence, wherein said second sequence does not have a terminal 5′-hydroxyl (5′-OH) or 5′-phosphate group.

[0202] In one embodiment, the invention features a double stranded short interfering nucleic acid (siNA) molecule that comprises a first nucleotide sequence complementary to a target RNA sequence or a portion thereof, and a second sequence having complementarity to said first sequence, wherein said second sequence comprises a terminal cap moiety at the 5′-end of said second sequence. In one embodiment, the terminal cap moiety comprises an inverted abasic, inverted deoxy abasic, inverted nucleotide moiety, a group shown in FIG. 10, an alkyl or cycloalkyl group, a heterocycle, or any other group that prevents RNAi activity in which the second sequence serves as a guide sequence or template for RNAi.

[0203] In one embodiment, the invention features a double stranded short interfering nucleic acid (siNA) molecule that comprises a first nucleotide sequence complementary to a target RNA sequence or a portion thereof, and a second sequence having complementarity to said first sequence, wherein said second sequence comprises a terminal cap moiety at the 5′-end and 3′-end of said second sequence. In one embodiment, each terminal cap moiety individually comprises an inverted abasic, inverted deoxy abasic, inverted nucleotide moiety, a group shown in FIG. 10, an alkyl or cycloalkyl group, a heterocycle, or any other group that prevents RNAi activity in which the second sequence serves as a guide sequence or template for RNAi.

[0204] In one embodiment, the invention features a method for generating siNA molecules of the invention with improved specificity for down regulating or inhibiting the expression of a target nucleic acid (e.g., a DNA or RNA such as a gene or its corresponding RNA), comprising (a) introducing one or more chemical modifications into the structure of a siNA molecule, and (b) assaying the siNA molecule of step (a) under conditions suitable for isolating siNA molecules having improved specificity. In another embodiment, the chemical modification used to improve specificity comprises terminal cap modifications at the 5′-end, 3′-end, or both 5′ and 3′-ends of the siNA molecule. The terminal cap modifications can comprise, for example, structures shown in FIG. 10 (e.g. inverted deoxyabasic moieties) or any other chemical modification that renders a portion of the siNA molecule (e.g. the sense strand) incapable of mediating RNA interference against an off target nucleic acid sequence. In a non-limiting example, a siNA molecule is designed such that only the antisense sequence of the siNA molecule can serve as a guide sequence for RISC mediated degradation of a corresponding target RNA sequence. This can be accomplished by rendering the sense sequence of the siNA inactive by introducing chemical modifications to the sense strand that preclude recognition of the sense strand as a guide sequence by RNAi machinery. In one embodiment, such chemical modifications comprise any chemical group at the 5′-end of the sense strand of the siNA, or any other group that serves to render the sense strand inactive as a guide sequence for mediating RNA interference. These modifications, for example, can result in a molecule where the 5′-end of the sense strand no longer has a free 5′-hydroxyl (5′-OH) or a free 5′-phosphate group (e.g., phosphate, diphosphate, triphosphate, cyclic phosphate etc.). Non-limiting examples of such siNA constructs are described herein, such as “Stab 9/10”, “Stab 7/8”, “Stab 7/19”, “Stab 17/22”, “Stab 23/24”, “Stab 24/25”, and “Stab 24/26” (e.g., any siNA having Stab 7, 9, 17, 23, or 24 sense strands) chemistries and variants thereof (see Table IV) wherein the 5′-end and 3′-end of the sense strand of the siNA do not comprise a hydroxyl group or phosphate group. Herein, numeric Stab chemistries include both 2′-fluoro and 2′-OCF3 versions of the chemistries shown in Table IV. For example, “Stab 7/8” refers to both Stab 7/8 and Stab 7F/8F etc.

[0205] In one embodiment, the invention features a method for generating siNA molecules of the invention with improved specificity for down regulating or inhibiting the expression of a target nucleic acid (e.g., a DNA or RNA such as a gene or its corresponding RNA), comprising introducing one or more chemical modifications into the structure of a siNA molecule that prevent a strand or portion of the siNA molecule from acting as a template or guide sequence for RNAi activity. In one embodiment, the inactive strand or sense region of the siNA molecule is the sense strand or sense region of the siNA molecule, i.e. the strand or region of the siNA that does not have complementarity to the target nucleic acid sequence. In one embodiment, such chemical modifications comprise any chemical group at the 5′-end of the sense strand or region of the siNA that does not comprise a 5′-hydroxyl (5′-OH) or 5′-phosphate group, or any other group that serves to render the sense strand or sense region inactive as a guide sequence for mediating RNA interference. Non-limiting examples of such siNA constructs are described herein, such as “Stab 9/10”, “Stab 7/8”, “Stab 7/19”, “Stab 17/22”, “Stab 23/24”, “Stab 24/25”, and “Stab 24/26” (e.g., any siNA having Stab 7, 9, 17, 23, or 24 sense strands) chemistries and variants thereof (see Table IV) wherein the 5′-end and 3′-end of the sense strand of the siNA do not comprise a hydroxyl group or phosphate group. Herein, numeric Stab chemistries include both 2′-fluoro and 2′-OCF3 versions of the chemistries shown in Table IV. For example, “Stab 7/8” refers to both Stab 7/8 and Stab 7F/8F etc.

[0206] In one embodiment, the invention features a method for screening siNA molecules that are active in mediating RNA interference against a target nucleic acid sequence comprising (a) generating a plurality of unmodified siNA molecules, (b) screening the siNA molecules of step (a) under conditions suitable for isolating siNA molecules that are active in mediating RNA interference against the target nucleic acid sequence, and (c) introducing chemical modifications (e.g. chemical modifications as described herein or as otherwise known in the art) into the active siNA molecules of (b). In one embodiment, the method further comprises re-screening the chemically modified siNA molecules of step (c) under conditions suitable for isolating chemically modified siNA molecules that are active in mediating RNA interference against the target nucleic acid sequence.

[0207] In one embodiment, the invention features a method for screening chemically modified siNA molecules that are active in mediating RNA interference against a target nucleic acid sequence comprising (a) generating a plurality of chemically modified siNA molecules (e.g. siNA molecules as described herein or as otherwise known in the art), and (b) screening the siNA molecules of step (a) under conditions suitable for isolating chemically modified siNA molecules that are active in mediating RNA interference against the target nucleic acid sequence.

[0208] The term “ligand” refers to any compound or molecule, such as a drug, peptide, hormone, or neurotransmitter, that is capable of interacting with another compound, such as a receptor, either directly or indirectly. The receptor that interacts with a ligand can be present on the surface of a cell or can alternately be an intercellular receptor. Interaction of the ligand with the receptor can result in a biochemical reaction, or can simply be a physical interaction or association.

[0209] In another embodiment, the invention features a method for generating siNA molecules of the invention with improved bioavailability comprising (a) introducing an excipient formulation to a siNA molecule, and (b) assaying the siNA molecule of step (a) under conditions suitable for isolating siNA molecules having improved bioavailability. Such excipients include polymers such as cyclodextrins, lipids, cationic lipids, polyamines, phospholipids, nanoparticles, receptors, ligands, and others.

[0210] In another embodiment, the invention features a method for generating siNA molecules of the invention with improved bioavailability comprising (a) introducing nucleotides having any of Formulae I-VII or any combination thereof into a siNA molecule, and (b) assaying the siNA molecule of step (a) under conditions suitable for isolating siNA molecules having improved bioavailability.

[0211] In another embodiment, polyethylene glycol (PEG) can be covalently attached to siNA compounds of the present invention. The attached PEG can be any molecular weight, preferably from about 100 to about 50,000 daltons (Da).

[0212] The present invention can be used alone or as a component of a kit having at least one of the reagents necessary to carry out the in vitro or in vivo introduction of RNA to test samples and/or subjects. For example, preferred components of the kit include a siNA molecule of the invention and a vehicle that promotes introduction of the siNA into cells of interest as described herein (e.g., using lipids and other methods of transfection known in the art, see for example Beigelman et al, U.S. Pat. No. 6,395,713). The kit can be used for target validation, such as in determining gene function and/or activity, or in drug optimization, and in drug discovery (see for example Usman et al., U.S. Ser. No. 60/402,996). Such a kit can also include instructions to allow a user of the kit to practice the invention.

[0213] The term “short interfering nucleic acid”, “siNA”, “short interfering RNA”, “siRNA”, “short interfering nucleic acid molecule”, “short interfering oligonucleotide molecule”, or “chemically-modified short interfering nucleic acid molecule” as used herein refers to any nucleic acid molecule capable of inhibiting or down regulating gene expression or viral replication, for example by mediating RNA interference “RNAi” or gene silencing in a sequence-specific manner; see for example Zamore et al., 2000, Cell, 101, 25-33; Bass, 2001, Nature, 411, 428-429; Elbashir et al., 2001, Nature, 411, 494-498; and Kreutzer et al., International PCT Publication No. WO 00/44895; Zernicka-Goetz et al., International PCT Publication No. WO 01/36646; Fire, International PCT Publication No. WO 99/32619; Plaetinck et al., International PCT Publication No. WO 00/01846; Mello and Fire, International PCT Publication No. WO 01/29058; Deschamps-Depaillette, International PCT Publication No. WO 99/07409; and Li et al., International PCT Publication No. WO 00/44914; Allshire, 2002, Science, 297, 1818-1819; Volpe et al., 2002, Science, 297, 1833-1837; Jenuwein, 2002, Science, 297, 2215-2218; and Hall et al., 2002, Science, 297, 2232-2237; Hutvagner and Zamore, 2002, Science, 297, 2056-60; McManus et al., 2002, RNA, 8, 842-850; Reinhart et al., 2002, Gene & Dev., 16, 1616-1626; and Reinhart & Bartel, 2002, Science, 297, 1831). Non limiting examples of siNA molecules of the invention are shown in FIGS. 4-6, and Tables II and III herein. For example the siNA can be a double-stranded polynucleotide molecule comprising self-complementary sense and antisense regions, wherein the antisense region comprises nucleotide sequence that is complementary to nucleotide sequence in a target nucleic acid molecule or a portion thereof and the sense region having nucleotide sequence corresponding to the target nucleic acid sequence or a portion thereof. The siNA can be assembled from two separate oligonucleotides, where one strand is the sense strand and the other is the antisense strand, wherein the antisense and sense strands are self-complementary (i.e., each strand comprises nucleotide sequence that is complementary to nucleotide sequence in the other strand; such as where the antisense strand and sense strand form a duplex or double stranded structure, for example wherein the double stranded region is about 15 to about 30, e.g., about 15, 16, 17, 18, 19, 20, 21, 22, 23, 24, 25, 26, 27, 28, 29 or 30 base pairs; the antisense strand comprises nucleotide sequence that is complementary to nucleotide sequence in a target nucleic acid molecule or a portion thereof and the sense strand comprises nucleotide sequence corresponding to the target nucleic acid sequence or a portion thereof (e.g., about 15 to about 25 or more nucleotides of the siNA molecule are complementary to the target nucleic acid or a portion thereof). Alternatively, the siNA is assembled from a single oligonucleotide, where the self-complementary sense and antisense regions of the siNA are linked by means of a nucleic acid based or non-nucleic acid-based linker(s). The siNA can be a polynucleotide with a duplex, asymmetric duplex, hairpin or asymmetric hairpin secondary structure, having self-complementary sense and antisense regions, wherein the antisense region comprises nucleotide sequence that is complementary to nucleotide sequence in a separate target nucleic acid molecule or a portion thereof and the sense region having nucleotide sequence corresponding to the target nucleic acid sequence or a portion thereof. The siNA can be a circular single-stranded polynucleotide having two or more loop structures and a stem comprising self-complementary sense and antisense regions, wherein the antisense region comprises nucleotide sequence that is complementary to nucleotide sequence in a target nucleic acid molecule or a portion thereof and the sense region having nucleotide sequence corresponding to the target nucleic acid sequence or a portion thereof, and wherein the circular polynucleotide can be processed either in vivo or in vitro to generate an active siNA molecule capable of mediating RNAi. The siNA can also comprise a single stranded polynucleotide having nucleotide sequence complementary to nucleotide sequence in a target nucleic acid molecule or a portion thereof (for example, where such siNA molecule does not require the presence within the siNA molecule of nucleotide sequence corresponding to the target nucleic acid sequence or a portion thereof), wherein the single stranded polynucleotide can further comprise a terminal phosphate group, such as a 5′-phosphate (see for example Martinez et al., 2002, Cell., 110, 563-574 and Schwarz et al., 2002, Molecular Cell, 10, 537-568), or 5′,3′-diphosphate. In certain embodiments, the siNA molecule of the invention comprises separate sense and antisense sequences or regions, wherein the sense and antisense regions are covalently linked by nucleotide or non-nucleotide linkers molecules as is known in the art, or are alternately non-covalently linked by ionic interactions, hydrogen bonding, van der waals interactions, hydrophobic interactions, and/or stacking interactions. In certain embodiments, the siNA molecules of the invention comprise nucleotide sequence that is complementary to nucleotide sequence of a target gene. In another embodiment, the siNA molecule of the invention interacts with nucleotide sequence of a target gene in a manner that causes inhibition of expression of the target gene. As used herein, siNA molecules need not be limited to those molecules containing only RNA, but further encompasses chemically-modified nucleotides and non-nucleotides. In certain embodiments, the short interfering nucleic acid molecules of the invention lack 2′-hydroxy (2′-OH) containing nucleotides. Applicant describes in certain embodiments short interfering nucleic acids that do not require the presence of nucleotides having a 2′-hydroxy group for mediating RNAi and as such, short interfering nucleic acid molecules of the invention optionally do not include any ribonucleotides (e.g., nucleotides having a 2′-OH group). Such siNA molecules that do not require the presence of ribonucleotides within the siNA molecule to support RNAi can however have an attached linker or linkers or other attached or associated groups, moieties, or chains containing one or more nucleotides with 2′-OH groups. Optionally, siNA molecules can comprise ribonucleotides at about 5, 10, 20, 30, 40, or 50% of the nucleotide positions. The modified short interfering nucleic acid molecules of the invention can also be referred to as short interfering modified oligonucleotides “siMON.” As used herein, the term siNA is meant to be equivalent to other terms used to describe nucleic acid molecules that are capable of mediating sequence specific RNAi, for example short interfering RNA (siRNA), double-stranded RNA (dsRNA), micro-RNA (miRNA), short hairpin RNA (shRNA), short interfering oligonucleotide, short interfering nucleic acid, short interfering modified oligonucleotide, chemically-modified siRNA, post-transcriptional gene silencing RNA (ptgsRNA), and others. In addition, as used herein, the term RNAi is meant to be equivalent to other terms used to describe sequence specific RNA interference, such as post transcriptional gene silencing, translational inhibition, or epigenetics. For example, siNA molecules of the invention can be used to epigenetically silence genes at both the post-transcriptional level or the pre-transcriptional level. In a non-limiting example, epigenetic modulation of gene expression by siNA molecules of the invention can result from siNA mediated modification of chromatin structure or methylation pattern to alter gene expression (see, for example, Verdel et al., 2004, Science, 303, 672-676; Pal-Bhadra et al., 2004, Science, 303, 669-672; Allshire, 2002, Science, 297, 1818-1819; Volpe et al., 2002, Science, 297, 1833-1837; Jenuwein, 2002, Science, 297, 2215-2218; and Hall et al., 2002, Science, 297, 2232-2237). In another non-limiting example, modulation of gene expression by siNA molecules of the invention can result from siNA mediated cleavage of RNA (either coding or non-coding RNA) via RISC, or alternately, translational inhibition as is known in the art.

[0214] In one embodiment, a siNA molecule of the invention is a duplex forming oligonucleotide “DFO”, (see for example FIGS. 14-15 and Vaish et al., U.S. Ser. No. 10/727,780 filed Dec. 3, 2003 and International PCT Application No. US04/16390, filed May 24, 2004).

[0215] In one embodiment, a siNA molecule of the invention is a multifunctional siNA, (see for example FIGS. 16-21 and Jadhav et al., U.S. Ser. No. 60/543,480 filed Feb. 10, 2004 and International PCT Application No. US04/16390, filed May 24, 2004). In one embodiment, the multifunctional siNA of the invention can comprise sequence targeting, for example, two or more regions of repeat expansion (RE) RNA (see for example target sequences in Tables II and III).

[0216] By “asymmetric hairpin” as used herein is meant a linear siNA molecule comprising an antisense region, a loop portion that can comprise nucleotides or non-nucleotides, and a sense region that comprises fewer nucleotides than the antisense region to the extent that the sense region has enough complementary nucleotides to base pair with the antisense region and form a duplex with loop. For example, an asymmetric hairpin siNA molecule of the invention can comprise an antisense region having length sufficient to mediate RNAi in a cell or in vitro system (e.g. about 15 to about 30, or about 15, 16, 17, 18, 19, 20, 21, 22, 23, 24, 25, 26, 27, 28, 29, or 30 nucleotides) and a loop region comprising about 4 to about 12 (e.g., about 4, 5, 6, 7, 8, 9, 10, 11, or 12) nucleotides, and a sense region having about 3 to about 25 (e.g., about 3, 4, 5, 6, 7, 8, 9, 10, 11, 12, 13, 14, 15, 16, 17, 18, 19, 20, 21, 22, 23, 24, or 25) nucleotides that are complementary to the antisense region. The asymmetric hairpin siNA molecule can also comprise a 5′-terminal phosphate group that can be chemically modified. The loop portion of the asymmetric hairpin siNA molecule can comprise nucleotides, non-nucleotides, linker molecules, or conjugate molecules as described herein.

[0217] By “asymmetric duplex” as used herein is meant a siNA molecule having two separate strands comprising a sense region and an antisense region, wherein the sense region comprises fewer nucleotides than the antisense region to the extent that the sense region has enough complementary nucleotides to base pair with the antisense region and form a duplex. For example, an asymmetric duplex siNA molecule of the invention can comprise an antisense region having length sufficient to mediate RNAi in a cell or in vitro system (e.g., about 15 to about 30, or about 15, 16, 17, 18, 19, 20, 21, 22, 23, 24, 25, 26, 27, 28, 29, or 30 nucleotides) and a sense region having about 3 to about 25 (e.g., about 3, 4, 5, 6, 7, 8, 9, 10, 11, 12, 13, 14, 15, 16, 17, 18, 19, 20, 21, 22, 23, 24, or 25) nucleotides that are complementary to the antisense region.

[0218] By “modulate” is meant that the expression of the gene, or level of a RNA molecule or equivalent RNA molecules encoding one or more proteins or protein subunits, or activity of one or more proteins or protein subunits is up regulated or down regulated, such that expression, level, or activity is greater than or less than that observed in the absence of the modulator. For example, the term “modulate” can mean “inhibit,” but the use of the word “modulate” is not limited to this definition.

[0219] By “inhibit”, “down-regulate”, or “reduce”, it is meant that the expression of the gene, or level of RNA molecules or equivalent RNA molecules encoding one or more proteins or protein subunits, or activity of one or more proteins or protein subunits, is reduced below that observed in the absence of the nucleic acid molecules (e.g., siNA) of the invention. In one embodiment, inhibition, down-regulation or reduction with an siNA molecule is below that level observed in the presence of an inactive or attenuated molecule. In another embodiment, inhibition, down-regulation, or reduction with siNA molecules is below that level observed in the presence of, for example, an siNA molecule with scrambled sequence or with mismatches. In another embodiment, inhibition, down-regulation, or reduction of gene expression with a nucleic acid molecule of the instant invention is greater in the presence of the nucleic acid molecule than in its absence. In one embodiment, inhibition, down regulation, or reduction of gene expression is associated with post transcriptional silencing, such as RNAi mediated cleavage of a target nucleic acid molecule (e.g. RNA) or inhibition of translation. In one embodiment, inhibition, down regulation, or reduction of gene expression is associated with pretranscriptional silencing, such as by alterations in DNA methylation patterns and DNA chromatin structure.

[0220] By “gene”, or “target gene”, is meant a nucleic acid that encodes an RNA, for example, nucleic acid sequences including, but not limited to, structural genes encoding a polypeptide. A gene or target gene can also encode a functional RNA (fRNA) or non-coding RNA (ncRNA), such as small temporal RNA (stRNA), micro RNA (miRNA), small nuclear RNA (snRNA), short interfering RNA (siRNA), small nucleolar RNA (snRNA), ribosomal RNA (rRNA), transfer RNA (tRNA) and precursor RNAs thereof. Such non-coding RNAs can serve as target nucleic acid molecules for siNA mediated RNA interference in modulating the activity of fRNA or ncRNA involved in functional or regulatory cellular processes. Abberant fRNA or ncRNA activity leading to disease can therefore be modulated by siNA molecules of the invention. siNA molecules targeting fRNA and ncRNA can also be used to manipulate or alter the genotype or phenotype of a subject, organism or cell, by intervening in cellular processes such as genetic imprinting, transcription, translation, or nucleic acid processing (e.g., transamination, methylation etc.). The target gene can be a gene derived from a cell, an endogenous gene, a transgene, or exogenous genes such as genes of a pathogen, for example a virus, which is present in the cell after infection thereof. The cell containing the target gene can be derived from or contained in any organism, for example a plant, animal, protozoan, virus, bacterium, or fungus. Non-limiting examples of plants include monocots, dicots, or gymnosperms. Non-limiting examples of animals include vertebrates or invertebrates. Non-limiting examples of fungi include molds or yeasts. For a review, see for example Snyder and Gerstein, 2003, Science, 300, 258-260.

[0221] By “non-canonical base pair” is meant any non-Watson Crick base pair, such as mismatches and/or wobble base pairs, including flipped mismatches, single hydrogen bond mismatches, trans-type mismatches, triple base interactions, and quadruple base interactions. Non-limiting examples of such non-canonical base pairs include, but are not limited to, AC reverse Hoogsteen, AC wobble, AU reverse Hoogsteen, GU wobble, AA N7 amino, CC 2-carbonyl-amino(H1)-N-3-amino(H2), GA sheared, UC 4-carbonyl-amino, UU imino-carbonyl, AC reverse wobble, AU Hoogsteen, AU reverse Watson Crick, CG reverse Watson Crick, GC N3-amino-amino N3, AA N1-amino symmetric, AA N7-amino symmetric, GA N7-N1 amino-carbonyl, GA+ carbonyl-amino N7-N1, GG N1-carbonyl symmetric, GG N3-amino symmetric, CC carbonyl-amino symmetric, CC N3-amino symmetric, UU 2-carbonyl-imino symmetric, UU 4-carbonyl-imino symmetric, AA amino-N3, AA N1-amino, AC amino 2-carbonyl, AC N3-amino, AC N7-amino, AU amino-4-carbonyl, AU N1-imino, AU N3-imino, AU N7-imino, CC carbonyl-amino, GA amino-N1, GA amino-N7, GA carbonyl-amino, GA N3-amino, GC amino-N3, GC carbonyl-amino, GC N3-amino, GC N7-amino, GG amino-N7, GG carbonyl-imino, GG N7-amino, GU amino-2-carbonyl, GU carbonyl-imino, GU imino-2-carbonyl, GU N7-imino, psiU imino-2-carbonyl, UC 4-carbonyl-amino, UC imino-carbonyl, UU imino-4-carbonyl, AC C2-H-N3, GA carbonyl-C2-H, UU imino-4-carbonyl 2 carbonyl-C5-H, AC amino(A) N3(C)-carbonyl, GC imino amino-carbonyl, Gpsi imino-2-carbonyl amino-2-carbonyl, and GU imino amino-2-carbonyl base pairs.

[0222] By “repeat expansion” or “RE” as used herein is meant, any protein, peptide, or polypeptide comprising a trinucleotide repeat expansion that is associated with the maintenance or development of a polyQ disease, such as Huntington disease, spinocerebellar ataxia, spinal and bulbar muscular dystrophy, and dentatorubropallidoluysian atrophy, for example as encoded by Genbank Accession Nos. shown in Table I (e.g., huntingtin, SCA1, SCA2, SCA3, SCA6, SCA7, SCA12, SCA17, SBMA, or DRPLA genes). The terms “repeat expansion” or “RE” also refer to nucleic acid sequences encloding any protein, peptide, or polypeptide comprising a trinucleotide repeat expansion, such as RNA or DNA comprising trinucleotide repeat expansion encoding sequence (see for example Wood et al., 2003, Neuropathol Appl Neurobiol., 29, 529-45). In certain embodiments, siNA molecules of the invention target both wild type and mutant forms of such repeat expansion disease genes. In certain embodiments, siNA molecules of the invention target only mutant forms of such repeat expansion disease genes.

[0223] By “Huntingtin” or “HD” as used herein is meant, any Huntingtin protein, peptide, or polypeptide associated with the deveopment or maintenence of Huntington disease. The terms “Huntingtin” and “HD” also refer to nucleic acid sequences encloding any huntingtin protein, peptide, or polypeptide, such as Huntingtin RNA or Huntingtin DNA (see for example Van Dellen et al., Jan. 24, 2004, Neurogenetics).

[0224] By “homologous sequence” is meant, a nucleotide sequence that is shared by one or more polynucleotide sequences, such as genes, gene transcripts and/or non-coding polynucleotides. For example, a homologous sequence can be a nucleotide sequence that is shared by two or more genes encoding related but different proteins, such as different members of a gene family, different protein epitopes, different protein isoforms or completely divergent genes, such as a cytokine and its corresponding receptors. A homologous sequence can be a nucleotide sequence that is shared by two or more non-coding polynucleotides, such as noncoding DNA or RNA, regulatory sequences, introns, and sites of transcriptional control or regulation. Homologous sequences can also include conserved sequence regions shared by more than one polynucleotide sequence. Homology does not need to be perfect homology (e.g., 100%), as partially homologous sequences are also contemplated by the instant invention (e.g., 99%, 98%, 97%, 96%, 95%, 94%, 93%, 92%, 91%, 90%, 89%, 88%, 87%, 86%, 85%, 84%, 83%, 82%, 81%, 80% etc.).

[0225] By “conserved sequence region” is meant, a nucleotide sequence of one or more regions in a polynucleotide does not vary significantly between generations or from one biological system, subject, or organism to another biological system, subject, or organism. The polynucleotide can include both coding and non-coding DNA and RNA.

[0226] By “sense region” is meant a nucleotide sequence of a siNA molecule having complementarity to an antisense region of the siNA molecule. In addition, the sense region of a siNA molecule can comprise a nucleic acid sequence having homology with a target nucleic acid sequence.

[0227] By “antisense region” is meant a nucleotide sequence of a siNA molecule having complementarity to a target nucleic acid sequence. In addition, the antisense region of a siNA molecule can optionally comprise a nucleic acid sequence having complementarity to a sense region of the siNA molecule.

[0228] By “target nucleic acid” is meant any nucleic acid sequence whose expression or activity is to be modulated. The target nucleic acid can be DNA or RNA. In one embodiment, a target nucleic acid of the invention is repeat expansion (RE) RNA or DNA.

[0229] By “complementarity” is meant that a nucleic acid can form hydrogen bond(s) with another nucleic acid sequence by either traditional Watson-Crick or other non-traditional types. In reference to the nucleic molecules of the present invention, the binding free energy for a nucleic acid molecule with its complementary sequence is sufficient to allow the relevant function of the nucleic acid to proceed, e.g., RNAi activity. Determination of binding free energies for nucleic acid molecules is well known in the art (see, e.g., Turner et al, 1987, CSH Symp. Quant. Biol. LII pp. 123-133; Frier et al., 1986, Proc. Nat. Acad. Sci. USA 83:9373-9377; Turner et al., 1987, J. Am. Chem. Soc. 109:3783-3785). A percent complementarity indicates the percentage of contiguous residues in a nucleic acid molecule that can form hydrogen bonds (e.g., Watson-Crick base pairing) with a second nucleic acid sequence (e.g., 5, 6, 7, 8, 9, or 10 nucleotides out of a total of 10 nucleotides in the first oligonucleotide being based paired to a second nucleic acid sequence having 10 nucleotides represents 50%, 60%, 70%, 80%, 90%, and 100% complementary respectively). “Perfectly complementary” means that all the contiguous residues of a nucleic acid sequence will hydrogen bond with the same number of contiguous residues in a second nucleic acid sequence. In one embodiment, a siNA molecule of the invention comprises about 15 to about 30 or more (e.g., about 15, 16, 17, 18, 19, 20, 21, 22, 23, 24, 25, 26, 27, 28, 29, or 30 or more) nucleotides that are complementary to one or more target nucleic acid molecules or a portion thereof.

[0230] In one embodiment, the siNA molecules of the invention represent a novel therapeutic approach to treat Huntington disease and related conditions such as progressive chorea, rigidity, and dementia, and seizures, and any other diseases or conditions that are related to or will respond to the levels of huntingtin in a cell or tissue, alone or in combination with other therapies. The reduction of huntingtin expression (specifically alleles associated with Huntington disease, such as polyglutamine repeat expansion and related SNPs) and thus reduction in the level of the respective protein relieves, to some extent, the symptoms of the disease or condition.

[0231] In one embodiment of the present invention, each sequence of a siNA molecule of the invention is independently about 15 to about 30 nucleotides in length, in specific embodiments about 15, 16, 17, 18, 19, 20, 21, 22, 23, 24, 25, 26, 27, 28, 29, or 30 nucleotides in length. In another embodiment, the siNA duplexes of the invention independently comprise about 15 to about 30 base pairs (e.g., about 15, 16, 17, 18, 19, 20, 21, 22, 23, 24, 25, 26, 27, 28, 29, or 30). In another embodiment, one or more strands of the siNA molecule of the invention independently comprises about 15 to about 30 nucleotides (e.g., about 15, 16, 17, 18, 19, 20, 21, 22, 23, 24, 25, 26, 27, 28, 29, or 30) that are complementary to a target nucleic acid molecule. In yet another embodiment, siNA molecules of the invention comprising hairpin or circular structures are about 35 to about 55 (e.g., about 35, 40, 45, 50 or 55) nucleotides in length, or about 38 to about 44 (e.g., about 38, 39, 40, 41, 42, 43, or 44) nucleotides in length and comprising about 15 to about 25 (e.g., about 15, 16, 17, 18, 19, 20, 21, 22, 23, 24, or 25) base pairs. Exemplary siNA molecules of the invention are shown in Table II. Exemplary synthetic siNA molecules of the invention are shown in Table III and/or FIGS. 4-5.

[0232] As used herein “cell” is used in its usual biological sense, and does not refer to an entire multicellular organism, e.g., specifically does not refer to a human. The cell can be present in an organism, e.g., birds, plants and mammals such as humans, cows, sheep, apes, monkeys, swine, dogs, and cats. The cell can be prokaryotic (e.g., bacterial cell) or eukaryotic (e.g., mammalian or plant cell). The cell can be of somatic or germ line origin, totipotent or pluripotent, dividing or non-dividing. The cell can also be derived from or can comprise a gamete or embryo, a stem cell, or a fully differentiated cell.

[0233] The siNA molecules of the invention are added directly, or can be complexed with cationic lipids, packaged within liposomes, or otherwise delivered to target cells or tissues. The nucleic acid or nucleic acid complexes can be locally administered to relevant tissues ex vivo, or in vivo through local delivery to the lung, with or without their incorporation in biopolymers. In particular embodiments, the nucleic acid molecules of the invention comprise sequences shown in Tables II-III and/or FIGS. 4-5. Examples of such nucleic acid molecules consist essentially of sequences defined in these tables and figures. Furthermore, the chemically modified constructs described in Table IV can be applied to any siNA sequence of the invention.

[0234] In another aspect, the invention provides mammalian cells containing one or more siNA molecules of this invention. The one or more siNA molecules can independently be targeted to the same or different sites.

[0235] By “RNA” is meant a molecule comprising at least one ribonucleotide residue. By “ribonucleotide” is meant a nucleotide with a hydroxyl group at the 2′ position of a β-D-ribofuranose moiety. The terms include double-stranded RNA, single-stranded RNA, isolated RNA such as partially purified RNA, essentially pure RNA, synthetic RNA, recombinantly produced RNA, as well as altered RNA that differs from naturally occurring RNA by the addition, deletion, substitution and/or alteration of one or more nucleotides. Such alterations can include addition of non-nucleotide material, such as to the end(s) of the siNA or internally, for example at one or more nucleotides of the RNA. Nucleotides in the RNA molecules of the instant invention can also comprise non-standard nucleotides, such as non-naturally occurring nucleotides or chemically synthesized nucleotides or deoxynucleotides. These altered RNAs can be referred to as analogs or analogs of naturally-occurring RNA.

[0236] By “subject” is meant an organism, which is a donor or recipient of explanted cells or the cells themselves. “Subject” also refers to an organism to which the nucleic acid molecules of the invention can be administered. A subject can be a mammal or mammalian cells, including a human or human cells.

[0237] The term “phosphorothioate” as used herein refers to an internucleotide linkage having Formula I, wherein Z and/or W comprise a sulfur atom. Hence, the term phosphorothioate refers to both phosphorothioate and phosphorodithioate internucleotide linkages.

[0238] The term “phosphonoacetate” as used herein refers to an internucleotide linkage having Formula I, wherein Z and/or W comprise an acetyl or protected acetyl group.

[0239] The term “thiophosphonoacetate” as used herein refers to an internucleotide linkage having Formula I, wherein Z comprises an acetyl or protected acetyl group and W comprises a sulfur atom or alternately W comprises an acetyl or protected acetyl group and Z comprises a sulfur atom.

[0240] The term “universal base” as used herein refers to nucleotide base analogs that form base pairs with each of the natural DNA/RNA bases with little discrimination between them. Non-limiting examples of universal bases include C-phenyl, C-naphthyl and other aromatic derivatives, inosine, azole carboxamides, and nitroazole derivatives such as 3-nitropyrrole, 4-nitroindole, 5-nitroindole, and 6-nitroindole as known in the art (see for example Loakes, 2001, Nucleic Acids Research, 29, 2437-2447).

[0241] The term “acyclic nucleotide” as used herein refers to any nucleotide having an acyclic ribose sugar, for example where any of the ribose carbons (C1, C2, C3, C4, or C5), are independently or in combination absent from the nucleotide.

[0242] The nucleic acid molecules of the instant invention, individually, or in combination or in conjunction with other drugs, can be used to for preventing or treating Huntington disease, spinocerebellar ataxia, spinal and bulbar muscular dystrophy, and dentatorubropallidoluysian atrophy in a subject or organism.

[0243] In one embodiment, the siNA molecules of the invention can be administered to a subject or can be administered to other appropriate cells (e.g., liver, intestine, pancreas) evident to those skilled in the art, individually or in combination with one or more drugs under conditions suitable for the treatment.

[0244] In a further embodiment, the siNA molecules can be used in combination with other known treatments to prevent or treat Huntington disease, spinocerebellar ataxia, spinal and bulbar muscular dystrophy, and dentatorubropallidoluysian atrophy in a subject or organism. For example, the described molecules could be used in combination with one or more known compounds, treatments, or procedures to prevent or treat Huntington disease, spinocerebellar ataxia, spinal and bulbar muscular dystrophy, and dentatorubropallidoluysian atrophy in a subject or organism as are known in the art.

[0245] In one embodiment, the invention features an expression vector comprising a nucleic acid sequence encoding at least one siNA molecule of the invention, in a manner which allows expression of the siNA molecule. For example, the vector can contain sequence(s) encoding both strands of a siNA molecule comprising a duplex. The vector can also contain sequence(s) encoding a single nucleic acid molecule that is self-complementary and thus forms a siNA molecule. Non-limiting examples of such expression vectors are described in Paul et al., 2002, Nature Biotechnology, 19, 505; Miyagishi and Taira, 2002, Nature Biotechnology, 19, 497; Lee et al., 2002, Nature Biotechnology, 19, 500; and Novina et al., 2002, Nature Medicine, advance online publication doi: 10.1038/nm725.

[0246] In another embodiment, the invention features a mammalian cell, for example, a human cell, including an expression vector of the invention.

[0247] In yet another embodiment, the expression vector of the invention comprises a sequence for a siNA molecule having complementarity to a RNA molecule referred to by a Genbank Accession numbers, for example Genbank Accession Nos. shown in Table I.

[0248] In one embodiment, an expression vector of the invention comprises a nucleic acid sequence encoding two or more siNA molecules, which can be the same or different.

[0249] In another aspect of the invention, siNA molecules that interact with target RNA molecules and down-regulate gene encoding target RNA molecules (for example target RNA molecules referred to by Genbank Accession numbers herein) are expressed from transcription units inserted into DNA or RNA vectors. The recombinant vectors can be DNA plasmids or viral vectors. siNA expressing viral vectors can be constructed based on, but not limited to, adeno-associated virus, retrovirus, adenovirus, or alphavirus. The recombinant vectors capable of expressing the siNA molecules can be delivered as described herein, and persist in target cells. Alternatively, viral vectors can be used that provide for transient expression of siNA molecules. Such vectors can be repeatedly administered as necessary. Once expressed, the siNA molecules bind and down-regulate gene function or expression via RNA interference (RNAi). Delivery of siNA expressing vectors can be systemic, such as by intravenous or intramuscular administration, by administration to target cells ex-planted from a subject followed by reintroduction into the subject, or by any other means that would allow for introduction into the desired target cell.

[0250] By “vectors” is meant any nucleic acid- and/or viral-based technique used to deliver a desired nucleic acid.

[0251] In one embodiment, a viral vector of the invention is an AAV vector. By an “AAV vector” is meant a vector derived from an adeno-associated virus serotype, including without limitation, AAV-1, AAV-2, AAV-3, AAV-4, AAV-5, AAVX7, etc. AAV vectors can have one or more of the AAV wild-type genes, preferably the rep and/or cap genes, deleted in whole or part, but retain functional flanking ITR sequences. Functional ITR sequences can be necessary for the rescue, replication and packaging of the AAV virion. Thus, an AAV vector is defined herein to include at least those sequences required for example in cis for replication and packaging (e.g., functional ITRs) of the virus. The ITRs need not be the wild-type nucleotide sequences, and may be altered, e.g., by the insertion, deletion or substitution of nucleotides, so long as the sequences provide for functional rescue, replication and packaging.

[0252] In one embodiment, the AAV expression vectors are constructed using known techniques to at least provide as operatively linked components in the direction of transcription, control elements including a transcriptional initiation region, the DNA of interest and a transcriptional termination region. The control elements are selected to be functional in a mammalian cell. The resulting construct which contains the operatively linked components is bounded (5′ and 3′) with functional AAV ITR sequences.

[0253] By “adeno-associated virus inverted terminal repeats” or “AAV ITRs” is meant the art-recognized regions found at each end of the AAV genome which function together in cis as origins of DNA replication and as packaging signals for the virus. AAV ITRs, together with the AAV rep coding region, provide for the efficient excision and rescue from, and integration of a nucleotide sequence interposed between two flanking ITRs into a mammalian cell genome.

[0254] The nucleotide sequences of AAV ITR regions are known. See for example Kotin, R. M. (1994) Human Gene Therapy 5:793-801; Berns, K. I. “Parvoviridae and their Replication” in Fundamental Virology, 2nd Edition, (B. N. Fields and D. M. Knipe, eds.). As used herein, an “AAV ITR” need not have the wild-type nucleotide sequence depicted, but may be altered, e.g., by the insertion, deletion or substitution of nucleotides. Additionally, the AAV ITR may be derived from any of several AAV serotypes, including without limitation, AAV-1, AAV-2, AAV-3, AAV-4, AAV-5, AAVX7, etc. Furthermore, 5′ and 3′ ITRs which flank a selected nucleotide sequence in an AAV vector need not necessarily be identical or derived from the same AAV serotype or isolate, so long as they function as intended, i.e., to allow for excision and rescue of the sequence of interest from a host cell genome or vector, and to allow integration of the heterologous sequence into the recipient cell genome when AAV Rep gene products are present in the cell.

[0255] In one embodiment, AAV ITRs can be derived from any of several AAV serotypes, including without limitation, AAV-1, AAV-2, AAV-3, AAV-4, AAV-5, AAVX7, etc. Furthermore, 5′ and 3′ ITRs which flank a selected nucleotide sequence in an AAV expression vector need not necessarily be identical or derived from the same AAV serotype or isolate, so long as they function as intended, i.e., to allow for excision and rescue of the sequence of interest from a host cell genome or vector, and to allow integration of the DNA molecule into the recipient cell genome when AAV Rep gene products are present in the cell.

[0256] In one embodiment, suitable DNA molecules for use in AAV vectors will be less than about 5 kilobases (kb) in size and will include, for example, a stuffer sequence and a sequence encoding a siRNA molecule of the invention. For example, in order to prevent any packaging of AAV genomic sequences containing the rep and cap genes, a plasmid containing the rep and cap DNA fragment may be modified by the inclusion of a stuffer fragment as is known in the art into the AAV genome which causes the DNA to exceed the length for optimal packaging. Thus, the helper fragment is not packaged into AAV virions. This is a safety feature, ensuring that only a recombinant AAV vector genome that does not exceed optimal packaging size is packaged into virions. An AAV helper fragment that incorporates a stuffer sequence can exceed the wild-type genome length of 4.6 kb, and lengths above 105% of the wild-type will generally not be packaged. The stuffer fragment can be derived from, for example, such non-viral sources as the Lac-Z or beta-galactosidase gene.

[0257] In one embodiment, the selected nucleotide sequence is operably linked to control elements that direct the transcription or expression thereof in the subject in vivo. Such control elements can comprise control sequences normally associated with the selected gene. Alternatively, heterologous control sequences can be employed. Useful heterologous control sequences generally include those derived from sequences encoding mammalian or viral genes. Examples include, but are not limited to, the SV40 early promoter, mouse mammary tumor virus LTR promoter; adenovirus major late promoter (Ad MLP); a herpes simplex virus (HSV) promoter, a cytomegalovirus (CMV) promoter such as the CMV immediate early promoter region (CMVIE), a rous sarcoma virus (RSV) promoter, pol II promoters, pol III promoters, synthetic promoters, hybrid promoters, and the like. In addition, sequences derived from nonviral genes, such as the murine metallothionein gene, will also find use herein. Such promoter sequences are commercially available from, e.g., Stratagene (San Diego, Calif.).

[0258] In one embodiment, both heterologous promoters and other control elements, such as CNS-specific and inducible promoters, enhancers and the like, will be of particular use. Examples of heterologous promoters include the CMB promoter. Examples of CNS-specific promoters include those isolated from the genes from myelin basic protein (MBP), glial fibrillary acid protein (GFAP), and neuron specific enolase (NSE). Examples of inducible promoters include DNA responsive elements for ecdysone, tetracycline, hypoxia and aufin.

[0259] In one embodiment, the AAV expression vector which harbors the DNA molecule of interest bounded by AAV ITRs, can be constructed by directly inserting the selected sequence(s) into an AAV genome which has had the major AAV open reading frames (“ORFs”) excised therefrom. Other portions of the AAV genome can also be deleted, so long as a sufficient portion of the ITRs remain to allow for replication and packaging functions. Such constructs can be designed using techniques well known in the art. See, e.g., U.S. Pat. Nos. 5,173,414 and 5,139,941; International Publication Nos. WO 92/01070 (published Jan. 23, 1992) and WO 93/03769 (published Mar. 4, 1993); Lebkowski et al. (1988) Molec. Cell. Biol. 8:3988-3996; Vincent et al. (1990) Vaccines 90 (Cold Spring Harbor Laboratory Press); Carter, B. J. (1992) Current Opinion in Biotechnology 3:533-539; Muzyczka, N. (1992) Current Topics in Microbiol. and Immunol. 158:97-129; Kotin, R. M. (1994) Human Gene Therapy 5:793-801; Shelling and Smith (1994) Gene Therapy 1:165-169; and Zhou et al. (1994) J. Exp. Med. 179:1867-1875.

[0260] Alternatively, AAV ITRs can be excised from the viral genome or from an AAV vector containing the same and fused 5′ and 3′ of a selected nucleic acid construct that is present in another vector using standard ligation techniques, such as those described in Sambrook et al., supra. For example, ligations can be accomplished in 20 mM Tris-Cl pH 7.5, 10 mM MgCl.sub.2, 10 mM DTT, 33 ug/ml BSA, 10 mM-50 mM NaCl, and either 40 uM ATP, 0.01-0.02 (Weiss) units T4 DNA ligase at 0° C. (for “sticky end” ligation) or 1 mM ATP, 0.3-0.6 (Weiss) units T4 DNA ligase at 14° C. (for “blunt end” ligation). Intermolecular “sticky end” ligations are usually performed at 30-100 μg/ml total DNA concentrations (5-100 nM total end concentration). AAV vectors which contain ITRs have been described in, e.g., U.S. Pat. No. 5,139,941. In particular, several AAV vectors are described therein which are available from the American Type Culture Collection (“ATCC”) under Accession Numbers 53222, 53223, 53224, 53225 and 53226.

[0261] Additionally, chimeric genes can be produced synthetically to include AAV ITR sequences arranged 5′ and 3′ of one or more selected nucleic acid sequences. Preferred codons for expression of the chimeric gene sequence in mammalian CNS cells can be used. The complete chimeric sequence is assembled from overlapping oligonucleotides prepared by standard methods. See, e.g., Edge, Nature (1981) 292:756; Nambair et al. Science (1984) 223:1299; Jay et al. J. Biol. Chem. (1984) 259:6311.

[0262] In order to produce rAAV virions, an AAV expression vector is introduced into a suitable host cell using known techniques, such as by transfection. A number of transfection techniques are generally known in the art. See, e.g., Graham et al. (1973) Virology, 52:456, Sambrook et al. (1989) Molecular Cloning, a laboratory manual, Cold Spring Harbor Laboratories, New York, Davis et al. (1986) Basic Methods in Molecular Biology, Elsevier, and Chu et al. (1981) Gene 13:197. Particularly suitable transfection methods include calcium phosphate co-precipitation (Graham et al. (1973) Virol. 52:456-467), direct micro-injection into cultured cells (Capecchi, M. R. (1980) Cell 22:479-488), electroporation (Shigekawa et al. (1988) BioTechniques 6:742-751), liposome mediated gene transfer (Mannino et al. (1988) BioTechniques 6:682-690), lipid-mediated transduction (Felgner et al. (1987) Proc. Natl. Acad. Sci. USA 84:7413-7417), and nucleic acid delivery using high-velocity microprojectiles (Klein et al. (1987) Nature 327:70-73).

[0263] In one embodiment, suitable host cells for producing rAAV virions include microorganisms, yeast cells, insect cells, and mammalian cells, that can be, or have been, used as recipients of a heterologous DNA molecule. The term includes the progeny of the original cell which has been transfected. Thus, a “host cell” as used herein generally refers to a cell which has been transfected with an exogenous DNA sequence. Cells from the stable human cell line, 293 (readily available through, e.g., the American Type Culture Collection under Accession Number ATCC CRL1573) can be used in the practice of the present invention. Particularly, the human cell line 293 is a human embryonic kidney cell line that has been transformed with adenovirus type-5 DNA fragments (Graham et al. (1977) J. Gen. Virol. 36:59), and expresses the adenoviral E1a and E1b genes (Aiello et al. (1979) Virology 94:460). The 293 cell line is readily transfected, and provides a particularly convenient platform in which to produce rAAV vinons.

[0264] In one embodiment, host cells containing the above-described AAV expression vectors are rendered capable of providing AAV helper functions in order to replicate and encapsidate the nucleotide sequences flanked by the AAV ITRs to produce rAAV virions. AAV helper functions are generally AAV-derived coding sequences which can be expressed to provide AAV gene products that, in turn, function in trans for productive AAV replication. AAV helper functions are used herein to complement necessary AAV functions that are missing from the AAV expression vectors. Thus, AAV helper functions include one, or both of the major AAV ORFs, namely the rep and cap coding regions, or functional homologues thereof.

[0265] The Rep expression products have been shown to possess many functions, including, among others: recognition, binding and nicking of the AAV origin of DNA replication; DNA helicase activity; and modulation of transcription from AAV (or other heterologous) promoters. The Cap expression products supply necessary packaging functions. AAV helper functions are used herein to complement AAV functions in trans that are missing from AAV vectors.

[0266] The term “AAV helper construct” refers generally to a nucleic acid molecule that includes nucleotide sequences providing AAV functions deleted from an AAV vector which is to be used to produce a transducing vector for delivery of a nucleotide sequence of interest. AAV helper constructs are commonly used to provide transient expression of AAV rep and/or cap genes to complement missing AAV functions that are necessary for lytic AAV replication; however, helper constructs lack AAV ITRs and can neither replicate nor package themselves. AAV helper constructs can be in the form of a plasmid, phage, transposon, cosmid, virus, or virion. A number of AAV helper constructs have been described, such as the commonly used plasmids pAAV/Ad and pIM29+45 which encode both Rep and Cap expression products. See, e.g., Samulski et al. (1989) J. Virol. 63:3822-3828; and McCarty et al. (1991) J. Virol. 65:2936-2945. A number of other vectors have been described which encode Rep and/or Cap expression products. See, e.g., U.S. Pat. No. 5,139,941.

[0267] By “AAV rep coding region” is meant the art-recognized region of the AAV genome which encodes the replication proteins Rep 78, Rep 68, Rep 52 and Rep 40. These Rep expression products have been shown to possess many functions, including recognition, binding and nicking of the AAV origin of DNA replication, DNA helicase activity and modulation of transcription from AAV (or other heterologous) promoters. The Rep expression products are collectively required for replicating the AAV genome. For a description of the AAV rep coding region, see, e.g., Muzyczka, N. (1992) Current Topics in Microbiol. and Immunol. 158:97-129; and Kotin, R. M. (1994) Human Gene Therapy 5:793-801. Suitable homologues of the AAV rep coding region include the human herpesvirus 6 (HHV-6) rep gene which is also known to mediate AAV-2 DNA replication (Thomson et al. (1994) Virology 204:304-311).

[0268] By “AAV cap coding region” is meant the art-recognized region of the AAV genome which encodes the capsid proteins VP1, VP2, and VP3, or functional homologues thereof. These Cap expression products supply the packaging functions which are collectively required for packaging the viral genome. For a description of the AAV cap coding region, see, e.g., Muzyczka, N. and Kotin, R. M. (supra).

[0269] In one embodiment, AAV helper functions are introduced into the host cell by transfecting the host cell with an AAV helper construct either prior to, or concurrently with, the transfection of the AAV expression vector. AAV helper constructs are thus used to provide at least transient expression of AAV rep and/or cap genes to complement missing AAV functions that are necessary for productive AAV infection. AAV helper constructs lack AAV ITRs and can neither replicate nor package themselves. These constructs can be in the form of a plasmid, phage, transposon, cosmid, virus, or virion. A number of AAV helper constructs have been described, such as the commonly used plasmids pAAV/Ad and pIM29+45 which encode both Rep and Cap expression products. See, e.g., Samulski et al. (1989) J. Virol. 63:3822-3828; and McCarty et al. (1991) J. Virol. 65:2936-2945. A number of other vectors have been described which encode Rep and/or Cap expression products. See, e.g., U.S. Pat. No. 5,139,941.

[0270] In one embodiment, both AAV expression vectors and AAV helper constructs can be constructed to contain one or more optional selectable markers. Suitable markers include genes which confer antibiotic resistance or sensitivity to, impart color to, or change the antigenic characteristics of those cells which have been transfected with a nucleic acid construct containing the selectable marker when the cells are grown in an appropriate selective medium. Several selectable marker genes that are useful in the practice of the invention include the hygromycin B resistance gene (encoding Aminoglycoside phosphotranferase (APH)) that allows selection in mammalian cells by conferring resistance to G418 (available from Sigma, St. Louis, Mo.). Other suitable markers are known to those of skill in the art.

[0271] In one embodiment, the host cell (or packaging cell) is rendered capable of providing non AAV derived functions, or “accessory functions,” in order to produce rAAV virions. Accessory functions are non AAV derived viral and/or cellular functions upon which AAV is dependent for its replication. Thus, accessory functions include at least those non AAV proteins and RNAs that are required in AAV replication, including those involved in activation of AAV gene transcription, stage specific AAV mRNA splicing, AAV DNA replication, synthesis of Cap expression products and AAV capsid assembly. Viral-based accessory functions can be derived from any of the known helper viruses.

[0272] In one embodiment, accessory functions can be introduced into and then expressed in host cells using methods known to those of skill in the art. Commonly, accessory functions are provided by infection of the host cells with an unrelated helper virus. A number of suitable helper viruses are known, including adenoviruses; herpesviruses such as herpes simplex virus types 1 and 2; and vaccinia viruses. Nonviral accessory functions will also find use herein, such as those provided by cell synchronization using any of various known agents. See, e.g., Buller et al. (1981) J. Virol. 40:241-247; McPherson et al. (1985) Virology 147:217-222; Schlehofer et al. (1986) Virology 152:110-117.

[0273] In one embodiment, accessory functions are provided using an accessory function vector. Accessory function vectors include nucleotide sequences that provide one or more accessory functions. An accessory function vector is capable of being introduced into a suitable host cell in order to support efficient AAV virion production in the host cell. Accessory function vectors can be in the form of a plasmid, phage, transposon or cosmid. Accessory vectors can also be in the form of one or more linearized DNA or RNA fragments which, when associated with the appropriate control elements and enzymes, can be transcribed or expressed in a host cell to provide accessory functions. See, for example, International Publication No. WO 97/17548, published May 15, 1997.

[0274] In one embodiment, nucleic acid sequences providing the accessory functions can be obtained from natural sources, such as from the genome of an adenovirus particle, or constructed using recombinant or synthetic methods known in the art. In this regard, adenovirus-derived accessory functions have been widely studied, and a number of adenovirus genes involved in accessory functions have been identified and partially characterized. See, e.g., Carter, B. J. (1990) “Adeno-Associated Virus Helper Functions,” in CRC Handbook of Parvoviruses, vol. I (P. Tijssen, ed.), and Muzyczka, N. (1992) Curr. Topics. Microbiol and Immun. 158:97-129. Specifically, early adenoviral gene regions E1 a, E2a, E4, VAI RNA and, possibly, E1b are thought to participate in the accessory process. Janik et al. (1981) Proc. Natl. Acad. Sci. USA 78:1925-1929. Herpesvirus-derived accessory functions have been described. See, e.g., Young et al. (1979) Prog. Med. Virol. 25:113. Vaccinia virus-derived accessory functions have also been described. See, e.g., Carter, B. J. (1990), supra., Schlehofer et al. (1986) Virology 152:110-117.

[0275] In one embodiment, as a consequence of the infection of the host cell with a helper virus, or transfection of the host cell with an accessory function vector, accessory functions are expressed which transactivate the AAV helper construct to produce AAV Rep and/or Cap proteins. The Rep expression products excise the recombinant DNA (including the DNA of interest) from the AAV expression vector. The Rep proteins also serve to duplicate the AAV genome. The expressed Cap proteins assemble into capsids, and the recombinant AAV genome is packaged into the capsids. Thus, productive AAV replication ensues, and the DNA is packaged into rAAV virions.

[0276] In one embodiment, following recombinant AAV replication, rAAV virions can be purified from the host cell using a variety of conventional purification methods, such as CsCl gradients. Further, if infection is employed to express the accessory functions, residual helper virus can be inactivated, using known methods. For example, adenovirus can be inactivated by heating to temperatures of approximately 60° C. for, e.g., 20 minutes or more. This treatment effectively inactivates only the helper virus since AAV is extremely heat stable while the helper adenovirus is heat labile. The resulting rAAV virions are then ready for use for DNA delivery to the CNS (e.g., cranial cavity) of the subject.

[0277] Methods of delivery of viral vectors include, but are not limited to, intra-arterial, intramuscular, intravenous, intranasal and oral routes. Generally, rAAV virions may be introduced into cells of the CNS using either in vivo or in vitro transduction techniques. If transduced in vitro, the desired recipient cell will be removed from the subject, transduced with rAAV virions and reintroduced into the subject. Alternatively, syngeneic or xenogeneic cells can be used where those cells will not generate an inappropriate immune response in the subject.

[0278] Suitable methods for the delivery and introduction of transduced cells into a subject have been described. For example, cells can be transduced in vitro by combining recombinant AAV virions with CNS cells e.g., in appropriate media, and screening for those cells harboring the DNA of interest can be screened using conventional techniques such as Southern blots and/or PCR, or by using selectable markers. Transduced cells can then be formulated into pharmaceutical compositions, described more fully below, and the composition introduced into the subject by various techniques, such as by grafting, intramuscular, intravenous, subcutaneous and intraperitoneal injection.

[0279] In one embodiment, for in vivo delivery, the rAAV virions are formulated into pharmaceutical compositions and will generally be administered parenterally, e.g., by intramuscular injection directly into skeletal or cardiac muscle or by injection into the CNS.

[0280] In one embodiment, viral vectors of the invention are delivered to the CNS via convection-enhanced delivery (CED) systems that can efficiently deliver viral vectors, e.g., AAV, over large regions of a subject's brain (e.g., striatum and/or cortex). As described in detail and exemplified below, these methods are suitable for a variety of viral vectors, for instance AAV vectors carrying therapeutic genes (e.g., siRNAs).

[0281] Any convection-enhanced delivery device may be appropriate for delivery of viral vectors. In one embodiment, the device is an osmotic pump or an infusion pump. Both osmotic and infusion pumps are commerically available from a variety of suppliers, for example Alzet Corporation, Hamilton Corporation, Aiza, Inc., Palo Alto, Calif.). Typically, a viral vector is delivered via CED devices as follows. A catheter, cannula or other injection device is inserted into CNS tissue in the chosen subject. In view of the teachings herein, one of skill in the art could readily determine which general area of the CNS is an appropriate target. For example, when delivering AAV vector encoding a therapeutic gene to treat PD, the striatum is a suitable area of the brain to target. Stereotactic maps and positioning devices are available, for example from ASI Instruments, Warren, Mich. Positioning may also be conducted by using anatomical maps obtained by CT and/or MRI imaging of the subject's brain to help guide the injection device to the chosen target. Moreover, because the methods described herein can be practiced such that relatively large areas of the brain take up the viral vectors, fewer infusion cannula are needed. Since surgical complications are related to the number of penetrations, the methods described herein also serve to reduce the side effects seen with conventional delivery techniques.

[0282] In one embodiment, pharmaceutical compositions will comprise sufficient genetic material to produce a therapeutically effective amount of the siRNA of interest, i.e., an amount sufficient to reduce or ameliorate symptoms of the disease state in question or an amount sufficient to confer the desired benefit. The pharmaceutical compositions will also contain a pharmaceutically acceptable excipient. Such excipients include any pharmaceutical agent that does not itself induce the production of antibodies harmful to the individual receiving the composition, and which may be administered without undue toxicity. Pharmaceutically acceptable excipients include, but are not limited to, sorbitol, Tween80, and liquids such as water, saline, glycerol and ethanol. Pharmaceutically acceptable salts can be included therein, for example, mineral acid salts such as hydrochlorides, hydrobromides, phosphates, sulfates, and the like; and the salts of organic acids such as acetates, propionates, malonates, benzoates, and the like. Additionally, auxiliary substances, such as wetting or emulsifying agents, pH buffering substances, and the like, may be present in such vehicles. A thorough discussion of pharmaceutically acceptable excipients is available in REMINGTON'S PHARMACEUTICAL SCIENCES (Mack Pub. Co., N.J. 1991).

[0283] As is apparent to those skilled in the art in view of the teachings of this specification, an effective amount of viral vector which must be added can be empirically determined. Administration can be effected in one dose, continuously or intermittently throughout the course of treatment. Methods of determining the most effective means and dosages of administration are well known to those of skill in the art and will vary with the viral vector, the composition of the therapy, the target cells, and the subject being treated. Single and multiple administrations can be carried out with the dose level and pattern being selected by the treating physician.

[0284] It should be understood that more than one transgene could be expressed by the delivered viral vector. Alternatively, separate vectors, each expressing one or more different transgenes, can also be delivered to the CNS as described herein. Furthermore, it is also intended that the viral vectors delivered by the methods of the present invention be combined with other suitable compositions and therapies.

[0285] Other features and advantages of the invention will be apparent from the following description of the preferred embodiments thereof, and from the claims.

### BRIEF DESCRIPTION OF THE DRAWINGS

[0286] FIG. 1 shows a non-limiting example of a scheme for the synthesis of siNA molecules. The complementary siNA sequence strands, strand 1 and strand 2, are synthesized in tandem and are connected by a cleavable linkage, such as a nucleotide succinate or abasic succinate, which can be the same or different from the cleavable linker used for solid phase synthesis on a solid support. The synthesis can be either solid phase or solution phase, in the example shown, the synthesis is a solid phase synthesis. The synthesis is performed such that a protecting group, such as a dimethoxytrityl group, remains intact on the terminal nucleotide of the tandem oligonucleotide. Upon cleavage and deprotection of the oligonucleotide, the two siNA strands spontaneously hybridize to form a siNA duplex, which allows the purification of the duplex by utilizing the properties of the terminal protecting group, for example by applying a trityl on purification method wherein only duplexes/oligonucleotides with the terminal protecting group are isolated.

[0287] FIG. 2 shows a MALDI-TOF mass spectrum of a purified siNA duplex synthesized by a method of the invention. The two peaks shown correspond to the predicted mass of the separate siNA sequence strands. This result demonstrates that the siNA duplex generated from tandem synthesis can be purified as a single entity using a simple trityl-on purification methodology.

[0288] FIG. 3 shows a non-limiting proposed mechanistic representation of target RNA degradation involved in RNAi. Double-stranded RNA (dsRNA), which is generated by RNA-dependent RNA polymerase (RdRP) from foreign single-stranded RNA, for example viral, transposon, or other exogenous RNA, activates the DICER enzyme that in turn generates siNA duplexes. Alternately, synthetic or expressed siNA can be introduced directly into a cell by appropriate means. An active siNA complex forms which recognizes a target RNA, resulting in degradation of the target RNA by the RISC endonuclease complex or in the synthesis of additional RNA by RNA-dependent RNA polymerase (RdRP), which can activate DICER and result in additional siNA molecules, thereby amplifying the RNAi response.

[0289] FIG. 4A-F shows non-limiting examples of chemically-modified siNA constructs of the present invention. In the figure, N stands for any nucleotide (adenosine, guanosine, cytosine, uridine, or optionally thymidine, for example thymidine can be substituted in the overhanging regions designated by parenthesis (N N). Various modifications are shown for the sense and antisense strands of the siNA constructs.

[0290] FIG. 4A: The sense strand comprises 21 nucleotides wherein the two terminal 3′-nucleotides are optionally base paired and wherein all nucleotides present are ribonucleotides except for (N N) nucleotides, which can comprise ribonucleotides, deoxynucleotides, universal bases, or other chemical modifications described herein. The antisense strand comprises 21 nucleotides, optionally having a 3′-terminal glyceryl moiety wherein the two terminal 3′-nucleotides are optionally complementary to the target RNA sequence, and wherein all nucleotides present are ribonucleotides except for (N N) nucleotides, which can comprise ribonucleotides, deoxynucleotides, universal bases, or other chemical modifications described herein. A modified internucleotide linkage, such as a phosphorothioate, phosphorodithioate or other modified internucleotide linkage as described herein, shown as “s”, optionally connects the (N N) nucleotides in the antisense strand.

[0291] FIG. 4B: The sense strand comprises 21 nucleotides wherein the two terminal 3′-nucleotides are optionally base paired and wherein all pyrimidine nucleotides that may be present are 2′deoxy-2′-fluoro modified nucleotides and all purine nucleotides that may be present are 2′-O-methyl modified nucleotides except for (N N) nucleotides, which can comprise ribonucleotides, deoxynucleotides, universal bases, or other chemical modifications described herein. The antisense strand comprises 21 nucleotides, optionally having a 3′-terminal glyceryl moiety and wherein the two terminal 3′-nucleotides are optionally complementary to the target RNA sequence, and wherein all pyrimidine nucleotides that may be present are 2′-deoxy-2′-fluoro modified nucleotides and all purine nucleotides that may be present are 2′-O-methyl modified nucleotides except for (N N) nucleotides, which can comprise ribonucleotides, deoxynucleotides, universal bases, or other chemical modifications described herein. A modified internucleotide linkage, such as a phosphorothioate, phosphorodithioate or other modified internucleotide linkage as described herein, shown as “s”, optionally connects the (N N) nucleotides in the sense and antisense strand.

[0292] FIG. 4C: The sense strand comprises 21 nucleotides having 5′- and 3′-terminal cap moieties wherein the two terminal 3′-nucleotides are optionally base paired and wherein all pyrimidine nucleotides that may be present are 2′-O-methyl or 2′-deoxy-2′-fluoro modified nucleotides except for (N N) nucleotides, which can comprise ribonucleotides, deoxynucleotides, universal bases, or other chemical modifications described herein. The antisense strand comprises 21 nucleotides, optionally having a 3′-terminal glyceryl moiety and wherein the two terminal 3′-nucleotides are optionally complementary to the target RNA sequence, and wherein all pyrimidine nucleotides that may be present are 2′-deoxy-2′-fluoro modified nucleotides except for (N N) nucleotides, which can comprise ribonucleotides, deoxynucleotides, universal bases, or other chemical modifications described herein. A modified internucleotide linkage, such as a phosphorothioate, phosphorodithioate or other modified internucleotide linkage as described herein, shown as “s”, optionally connects the (N N) nucleotides in the antisense strand.

[0293] FIG. 4D: The sense strand comprises 21 nucleotides having 5′- and 3′-terminal cap moieties wherein the two terminal 3′-nucleotides are optionally base paired and wherein all pyrimidine nucleotides that may be present are 2′-deoxy-2′-fluoro modified nucleotides except for (N N) nucleotides, which can comprise ribonucleotides, deoxynucleotides, universal bases, or other chemical modifications described herein and wherein and all purine nucleotides that may be present are 2′-deoxy nucleotides. The antisense strand comprises 21 nucleotides, optionally having a 3′-terminal glyceryl moiety and wherein the two terminal 3′-nucleotides are optionally complementary to the target RNA sequence, wherein all pyrimidine nucleotides that may be present are 2′-deoxy-2′-fluoro modified nucleotides and all purine nucleotides that may be present are 2′-O-methyl modified nucleotides except for (N N) nucleotides, which can comprise ribonucleotides, deoxynucleotides, universal bases, or other chemical modifications described herein. A modified internucleotide linkage, such as a phosphorothioate, phosphorodithioate or other modified internucleotide linkage as described herein, shown as “s”, optionally connects the (N N) nucleotides in the antisense strand.

[0294] FIG. 4E: The sense strand comprises 21 nucleotides having 5′- and 3′-terminal cap moieties wherein the two terminal 3′-nucleotides are optionally base paired and wherein all pyrimidine nucleotides that may be present are 2′-deoxy-2′-fluoro modified nucleotides except for (N N) nucleotides, which can comprise ribonucleotides, deoxynucleotides, universal bases, or other chemical modifications described herein. The antisense strand comprises 21 nucleotides, optionally having a 3′-terminal glyceryl moiety and wherein the two terminal 3′-nucleotides are optionally complementary to the target RNA sequence, and wherein all pyrimidine nucleotides that may be present are 2′-deoxy-2′-fluoro modified nucleotides and all purine nucleotides that may be present are 2′-O-methyl modified nucleotides except for (N N) nucleotides, which can comprise ribonucleotides, deoxynucleotides, universal bases, or other chemical modifications described herein. A modified internucleotide linkage, such as a phosphorothioate, phosphorodithioate or other modified internucleotide linkage as described herein, shown as “s”, optionally connects the (N N) nucleotides in the antisense strand.

[0295] FIG. 4F: The sense strand comprises 21 nucleotides having 5′- and 3′-terminal cap moieties wherein the two terminal 3′-nucleotides are optionally base paired and wherein all pyrimidine nucleotides that may be present are 2′-deoxy-2′-fluoro modified nucleotides except for (N N) nucleotides, which can comprise ribonucleotides, deoxynucleotides, universal bases, or other chemical modifications described herein and wherein and all purine nucleotides that may be present are 2′-deoxy nucleotides. The antisense strand comprises 21 nucleotides, optionally having a 3′-terminal glyceryl moiety and wherein the two terminal 3′-nucleotides are optionally complementary to the target RNA sequence, and having one 3′-terminal phosphorothioate internucleotide linkage and wherein all pyrimidine nucleotides that may be present are 2′-deoxy-2′-fluoro modified nucleotides and all purine nucleotides that may be present are 2′-deoxy nucleotides except for (N N) nucleotides, which can comprise ribonucleotides, deoxynucleotides, universal bases, or other chemical modifications described herein. A modified internucleotide linkage, such as a phosphorothioate, phosphorodithioate or other modified internucleotide linkage as described herein, shown as “s”, optionally connects the (N N) nucleotides in the antisense strand. The antisense strand of constructs A-F comprise sequence complementary to any target nucleic acid sequence of the invention. Furthermore, when a glyceryl moiety (L) is present at the 3′-end of the antisense strand for any construct shown in FIG. 4 A-F, the modified internucleotide linkage is optional.

[0296] FIG. 5A-F shows non-limiting examples of specific chemically-modified siNA sequences of the invention. A-F applies the chemical modifications described in FIG. 4A-F to a Huntingtin siNA sequence. Such chemical modifications can be applied to any repeat expansion (RE) sequence.

[0297] FIG. 6 shows non-limiting examples of different siNA constructs of the invention. The examples shown (constructs 1, 2, and 3) have 19 representative base pairs; however, different embodiments of the invention include any number of base pairs described herein. Bracketed regions represent nucleotide overhangs, for example, comprising about 1, 2, 3, or 4 nucleotides in length, preferably about 2 nucleotides. Constructs 1 and 2 can be used independently for RNAi activity. Construct 2 can comprise a polynucleotide or non-nucleotide linker, which can optionally be designed as a biodegradable linker. In one embodiment, the loop structure shown in construct 2 can comprise a biodegradable linker that results in the formation of construct 1 in vivo and/or in vitro. In another example, construct 3 can be used to generate construct 2 under the same principle wherein a linker is used to generate the active siNA construct 2 in vivo and/or in vitro, which can optionally utilize another biodegradable linker to generate the active siNA construct 1 in vivo and/or in vitro. As such, the stability and/or activity of the siNA constructs can be modulated based on the design of the siNA construct for use in vivo or in vitro and/or in vitro.

[0298] FIG. 7A-C is a diagrammatic representation of a scheme utilized in generating an expression cassette to generate siNA hairpin constructs.

[0299] FIG. 7A: A DNA oligomer is synthesized with a 5′-restriction site (R1) sequence followed by a region having sequence identical (sense region of siNA) to a predetermined repeat expansion (RE) target sequence, wherein the sense region comprises, for example, about 19, 20, 21, or 22 nucleotides (N) in length, which is followed by a loop sequence of defined sequence (X), comprising, for example, about 3 to about 10 nucleotides.

[0300] FIG. 7B: The synthetic construct is then extended by DNA polymerase to generate a hairpin structure having self-complementary sequence that will result in a siNA transcript having specificity for a repeat expansion (RE) target sequence and having self-complementary sense and antisense regions.

[0301] FIG. 7C: The construct is heated (for example to about 95° C.) to linearize the sequence, thus allowing extension of a complementary second DNA strand using a primer to the 3′-restriction sequence of the first strand. The double-stranded DNA is then inserted into an appropriate vector for expression in cells. The construct can be designed such that a 3′-terminal nucleotide overhang results from the transcription, for example, by engineering restriction sites and/or utilizing a poly-U termination region as described in Paul et al., 2002, Nature Biotechnology, 29, 505-508.

[0302] FIG. 8A-C is a diagrammatic representation of a scheme utilized in generating an expression cassette to generate double-stranded siNA constructs.

[0303] FIG. 8A: A DNA oligomer is synthesized with a 5′-restriction (R1) site sequence followed by a region having sequence identical (sense region of siNA) to a predetermined repeat expansion (RE) target sequence, wherein the sense region comprises, for example, about 19, 20, 21, or 22 nucleotides (N) in length, and which is followed by a 3′-restriction site (R2) which is adjacent to a loop sequence of defined sequence (X).

[0304] FIG. 8B: The synthetic construct is then extended by DNA polymerase to generate a hairpin structure having self-complementary sequence.

[0305] FIG. 8C: The construct is processed by restriction enzymes specific to R1 and R2 to generate a double-stranded DNA which is then inserted into an appropriate vector for expression in cells. The transcription cassette is designed such that a U6 promoter region flanks each side of the dsDNA which generates the separate sense and antisense strands of the siNA. Poly T termination sequences can be added to the constructs to generate U overhangs in the resulting transcript.

[0306] FIG. 9A-E is a diagrammatic representation of a method used to determine target sites for siNA mediated RNAi within a particular target nucleic acid sequence, such as messenger RNA.

[0307] FIG. 9A: A pool of siNA oligonucleotides are synthesized wherein the antisense region of the siNA constructs has complementarity to target sites across the target nucleic acid sequence, and wherein the sense region comprises sequence complementary to the antisense region of the siNA.

[0308] FIGS. 9B&C: (FIG. 9B) The sequences are pooled and are inserted into vectors such that (FIG. 9C) transfection of a vector into cells results in the expression of the siNA.

[0309] FIG. 9D: Cells are sorted based on phenotypic change that is associated with modulation of the target nucleic acid sequence.

[0310] FIG. 9E: The siNA is isolated from the sorted cells and is sequenced to identify efficacious target sites within the target nucleic acid sequence.

[0311] FIG. 10 shows non-limiting examples of different stabilization chemistries (1-10) that can be used, for example, to stabilize the 3′-end of siNA sequences of the invention, including (1) [3-3′]-inverted deoxyribose; (2) deoxyribonucleotide; (3) [5′-3′]-3′-deoxyribonucleotide; (4) [5′-3′]-ribonucleotide; (5) [5′-3′]-3′-O-methyl ribonucleotide; (6) 3′-glyceryl; (7) [3′-5′]-3′-deoxyribonucleotide; (8) [3′-3′]-deoxyribonucleotide; (9) [5′-2′]-deoxyribonucleotide; and (10) [5-3′]-dideoxyribonucleotide. In addition to modified and unmodified backbone chemistries indicated in the figure, these chemistries can be combined with different backbone modifications as described herein, for example, backbone modifications having Formula I. In addition, the 2′-deoxy nucleotide shown 5′ to the terminal modifications shown can be another modified or unmodified nucleotide or non-nucleotide described herein, for example modifications having any of Formulae I-VII or any combination thereof.

[0312] FIG. 11 shows a non-limiting example of a strategy used to identify chemically modified siNA constructs of the invention that are nuclease resistance while preserving the ability to mediate RNAi activity. Chemical modifications are introduced into the siNA construct based on educated design parameters (e.g. introducing 2′-mofications, base modifications, backbone modifications, terminal cap modifications etc). The modified construct in tested in an appropriate system (e.g. human serum for nuclease resistance, shown, or an animal model for PK/delivery parameters). In parallel, the siNA construct is tested for RNAi activity, for example in a cell culture system such as a luciferase reporter assay). Lead siNA constructs are then identified which possess a particular characteristic while maintaining RNAi activity, and can be further modified and assayed once again. This same approach can be used to identify siNA-conjugate molecules with improved pharmacokinetic profiles, delivery, and RNAi activity.

[0313] FIG. 12 shows non-limiting examples of phosphorylated siNA molecules of the invention, including linear and duplex constructs and asymmetric derivatives thereof.

[0314] FIG. 13 shows non-limiting examples of chemically modified terminal phosphate groups of the invention.

[0315] FIG. 14A shows a non-limiting example of methodology used to design self complementary DFO constructs utilizing palindrome and/or repeat nucleic acid sequences that are identified in a target nucleic acid sequence. (i) A palindrome or repeat sequence is identified in a nucleic acid target sequence. (ii) A sequence is designed that is complementary to the target nucleic acid sequence and the palindrome sequence. (iii) An inverse repeat sequence of the non-palindrome/repeat portion of the complementary sequence is appended to the 3′-end of the complementary sequence to generate a self complementary DFO molecule comprising sequence complementary to the nucleic acid target. (iv) The DFO molecule can self-assemble to form a double stranded oligonucleotide. FIG. 14B shows a non-limiting representative example of a duplex forming oligonucleotide sequence. FIG. 14C shows a non-limiting example of the self assembly schematic of a representative duplex forming oligonucleotide sequence. FIG. 14D shows a non-limiting example of the self assembly schematic of a representative duplex forming oligonucleotide sequence followed by interaction with a target nucleic acid sequence resulting in modulation of gene expression.

[0316] FIG. 15 shows a non-limiting example of the design of self complementary DFO constructs utilizing palindrome and/or repeat nucleic acid sequences that are incorporated into the DFO constructs that have sequence complementary to any target nucleic acid sequence of interest. Incorporation of these palindrome/repeat sequences allow the design of DFO constructs that form duplexes in which each strand is capable of mediating modulation of target gene expression, for example by RNAi. First, the target sequence is identified. A complementary sequence is then generated in which nucleotide or non-nucleotide modifications (shown as X or Y) are introduced into the complementary sequence that generate an artificial palindrome (shown as XYXYXY in the Figure). An inverse repeat of the non-palindrome/repeat complementary sequence is appended to the 3′-end of the complementary sequence to generate a self complementary DFO comprising sequence complementary to the nucleic acid target. The DFO can self-assemble to form a double stranded oligonucleotide.

[0317] FIG. 16 shows non-limiting examples of multifunctional siNA molecules of the invention comprising two separate polynucleotide sequences that are each capable of mediating RNAi directed cleavage of differing target nucleic acid sequences. FIG. 16A shows a non-limiting example of a multifunctional siNA molecule having a first region that is complementary to a first target nucleic acid sequence (complementary region 1) and a second region that is complementary to a second target nucleic acid sequence (complementary region 2), wherein the first and second complementary regions are situated at the 3′-ends of each polynucleotide sequence in the multifunctional siNA. The dashed portions of each polynucleotide sequence of the multifunctional siNA construct have complementarity with regard to corresponding portions of the siNA duplex, but do not have complementarity to the target nucleic acid sequences. FIG. 16B shows a non-limiting example of a multifunctional siNA molecule having a first region that is complementary to a first target nucleic acid sequence (complementary region 1) and a second region that is complementary to a second target nucleic acid sequence (complementary region 2), wherein the first and second complementary regions are situated at the 5′-ends of each polynucleotide sequence in the multifunctional siNA. The dashed portions of each polynucleotide sequence of the multifunctional siNA construct have complementarity with regard to corresponding portions of the siNA duplex, but do not have complementarity to the target nucleic acid sequences.

[0318] FIG. 17 shows non-limiting examples of multifunctional siNA molecules of the invention comprising a single polynucleotide sequence comprising distinct regions that are each capable of mediating RNAi directed cleavage of differing target nucleic acid sequences. FIG. 17A shows a non-limiting example of a multifunctional siNA molecule having a first region that is complementary to a first target nucleic acid sequence (complementary region 1) and a second region that is complementary to a second target nucleic acid sequence (complementary region 2), wherein the second complementary region is situated at the 3′-end of the polynucleotide sequence in the multifunctional siNA. The dashed portions of each polynucleotide sequence of the multifunctional siNA construct have complementarity with regard to corresponding portions of the siNA duplex, but do not have complementarity to the target nucleic acid sequences. FIG. 17B shows a non-limiting example of a multifunctional siNA molecule having a first region that is complementary to a first target nucleic acid sequence (complementary region 1) and a second region that is complementary to a second target nucleic acid sequence (complementary region 2), wherein the first complementary region is situated at the 5′-end of the polynucleotide sequence in the multifunctional siNA. The dashed portions of each polynucleotide sequence of the multifunctional siNA construct have complementarity with regard to corresponding portions of the siNA duplex, but do not have complementarity to the target nucleic acid sequences. In one embodiment, these multifunctional siNA constructs are processed in vivo or in vitro to generate multifunctional siNA constructs as shown in FIG. 16.

[0319] FIG. 18 shows non-limiting examples of multifunctional siNA molecules of the invention comprising two separate polynucleotide sequences that are each capable of mediating RNAi directed cleavage of differing target nucleic acid sequences and wherein the multifunctional siNA construct further comprises a self complementary, palindrome, or repeat region, thus enabling shorter bifuctional siNA constructs that can mediate RNA interference against differing target nucleic acid sequences. FIG. 18A shows a non-limiting example of a multifunctional siNA molecule having a first region that is complementary to a first target nucleic acid sequence (complementary region 1) and a second region that is complementary to a second target nucleic acid sequence (complementary region 2), wherein the first and second complementary regions are situated at the 3′-ends of each polynucleotide sequence in the multifunctional siNA, and wherein the first and second complementary regions further comprise a self complementary, palindrome, or repeat region. The dashed portions of each polynucleotide sequence of the multifunctional siNA construct have complementarity with regard to corresponding portions of the siNA duplex, but do not have complementarity to the target nucleic acid sequences. FIG. 18B shows a non-limiting example of a multifunctional siNA molecule having a first region that is complementary to a first target nucleic acid sequence (complementary region 1) and a second region that is complementary to a second target nucleic acid sequence (complementary region 2), wherein the first and second complementary regions are situated at the 5′-ends of each polynucleotide sequence in the multifunctional siNA, and wherein the first and second complementary regions further comprise a self complementary, palindrome, or repeat region. The dashed portions of each polynucleotide sequence of the multifunctional siNA construct have complementarity with regard to corresponding portions of the siNA duplex, but do not have complementarity to the target nucleic acid sequences.

[0320] FIG. 19 shows non-limiting examples of multifunctional siNA molecules of the invention comprising a single polynucleotide sequence comprising distinct regions that are each capable of mediating RNAi directed cleavage of differing target nucleic acid sequences and wherein the multifunctional siNA construct further comprises a self complementary, palindrome, or repeat region, thus enabling shorter bifuctional siNA constructs that can mediate RNA interference against differing target nucleic acid sequences. FIG. 19A shows a non-limiting example of a multifunctional siNA molecule having a first region that is complementary to a first target nucleic acid sequence (complementary region 1) and a second region that is complementary to a second target nucleic acid sequence (complementary region 2), wherein the second complementary region is situated at the 3′-end of the polynucleotide sequence in the multifunctional siNA, and wherein the first and second complementary regions further comprise a self complementary, palindrome, or repeat region. The dashed portions of each polynucleotide sequence of the multifunctional siNA construct have complementarity with regard to corresponding portions of the siNA duplex, but do not have complementarity to the target nucleic acid sequences. FIG. 19B shows a non-limiting example of a multifunctional siNA molecule having a first region that is complementary to a first target nucleic acid sequence (complementary region 1) and a second region that is complementary to a second target nucleic acid sequence (complementary region 2), wherein the first complementary region is situated at the 5′-end of the polynucleotide sequence in the multifunctional siNA, and wherein the first and second complementary regions further comprise a self complementary, palindrome, or repeat region. The dashed portions of each polynucleotide sequence of the multifunctional siNA construct have complementarity with regard to corresponding portions of the siNA duplex, but do not have complementarity to the target nucleic acid sequences. In one embodiment, these multifunctional siNA constructs are processed in vivo or in vitro to generate multifunctional siNA constructs as shown in FIG. 18.

[0321] FIG. 20 shows a non-limiting example of how multifunctional siNA molecules of the invention can target two separate target nucleic acid molecules, such as separate RNA molecules encoding differing proteins, for example, a cytokine and its corresponding receptor, differing viral strains, a virus and a cellular protein involved in viral infection or replication, or differing proteins involved in a common or divergent biologic pathway that is implicated in the maintenance of progression of disease. Each strand of the multifunctional siNA construct comprises a region having complementarity to separate target nucleic acid molecules. The multifunctional siNA molecule is designed such that each strand of the siNA can be utilized by the RISC complex to initiate RNA interference mediated cleavage of its corresponding target. These design parameters can include destabilization of each end of the siNA construct (see for example Schwarz et al., 2003, Cell, 115, 199-208). Such destabilization can be accomplished for example by using guanosine-cytidine base pairs, alternate base pairs (e.g., wobbles), or destabilizing chemically modified nucleotides at terminal nucleotide positions as is known in the art.

[0322] FIG. 21 shows a non-limiting example of how multifunctional siNA molecules of the invention can target two separate target nucleic acid sequences within the same target nucleic acid molecule, such as alternate coding regions of a RNA, coding and non-coding regions of a RNA, or alternate splice variant regions of a RNA. Each strand of the multifunctional siNA construct comprises a region having complementarity to the separate regions of the target nucleic acid molecule. The multifunctional siNA molecule is designed such that each strand of the siNA can be utilized by the RISC complex to initiate RNA interference mediated cleavage of its corresponding target region. These design parameters can include destabilization of each end of the siNA construct (see for example Schwarz et al., 2003, Cell, 115, 199-208). Such destabilization can be accomplished for example by using guanosine-cytidine base pairs, alternate base pairs (e.g., wobbles), or destabilizing chemically modified nucleotides at terminal nucleotide positions as is known in the art.

[0323] FIG. 22(A-H) shows non-limiting examples of tethered multifunctional siNA constructs of the invention. In the examples shown, a linker (e.g., nucleotide or non-nucleotide linker) connects two siNA regions (e.g., two sense, two antisense, or alternately a sense and an antisense region together. Separate sense (or sense and antisense) sequences corresponding to a first target sequence and second target sequence are hybridized to their corresponding sense and/or antisense sequences in the multifunctional siNA. In addition, various conjugates, ligands, aptamers, polymers or reporter molecules can be attached to the linker region for selective or improved delivery and/or pharmacokinetic properties.

[0324] FIG. 23 shows a non-limiting example of various dendrimer based multifunctional siNA designs.

[0325] FIG. 24 shows a non-limiting example of various supramolecular multifunctional siNA designs.

[0326] FIG. 25 shows a non-limiting example of a dicer enabled multifunctional siNA design using a 30 nucleotide precursor siNA construct. A 30 base pair duplex is cleaved by Dicer into 22 and 8 base pair products from either end (8 b.p. fragments not shown). For ease of presentation the overhangs generated by dicer are not shown—but can be compensated for. Three targeting sequences are shown. The required sequence identity overlapped is indicated by grey boxes. The N's of the parent 30 b.p. siNA are suggested sites of 2′-OH positions to enable Dicer cleavage if this is tested in stabilized chemistries. Note that processing of a 30mer duplex by Dicer RNase III does not give a precise 22+8 cleavage, but rather produces a series of closely related products (with 22+8 being the primary site). Therefore, processing by Dicer will yield a series of active siNAs.

[0327] FIG. 26 shows a non-limiting example of a dicer enabled multifunctional siNA design using a 40 nucleotide precursor siNA construct. A 40 base pair duplex is cleaved by Dicer into 20 base pair products from either end. For ease of presentation the overhangs generated by dicer are not shown—but can be compensated for. Four targeting sequences are shown. The target sequences having homology are enclosed by boxes. This design format can be extended to larger RNAs. If chemically stabilized siNAs are bound by Dicer, then strategically located ribonucleotide linkages can enable designer cleavage products that permit our more extensive repertoire of multiifunctional designs. For example cleavage products not limited to the Dicer standard of approximately 22-nucleotides can allow multifunctional siNA constructs with a target sequence identity overlap ranging from, for example, about 3 to about 15 nucleotides.

[0328] FIG. 27 shows a non-limiting example of additional multifunctional siNA construct designs of the invention. In one example, a conjugate, ligand, aptamer, label, or other moiety is attached to a region of the multifunctional siNA to enable improved delivery or pharmacokinetic profiling.

[0329] FIG. 28 shows a non-limiting example of additional multifunctional siNA construct designs of the invention. In one example, a conjugate, ligand, aptamer, label, or other moiety is attached to a region of the multifunctional siNA to enable improved delivery or pharmacokinetic profiling.

[0330] FIG. 29 shows a non-limiting example of a cholesterol linked phosphoramidite that can be used to synthesize cholesterol conjugated siNA molecules of the invention. An example is shown with the cholesterol moiety linked to the 5′-end of the sense strand of a siNA molecule.

[0331] FIG. 30 shows a non-limiting example of siNA mediated inhibition of expression of myc-tagged human HD protein in HEK-293 cells transfected with active and inverted control siNA constructs along with untreated and transfection controls.

### DETAILED DESCRIPTION OF THE INVENTION

Mechanism of Action of Nucleic Acid Molecules of the Invention

[0332] The discussion that follows discusses the proposed mechanism of RNA interference mediated by short interfering RNA as is presently known, and is not meant to be limiting and is not an admission of prior art. Applicant demonstrates herein that chemically-modified short interfering nucleic acids possess similar or improved capacity to mediate RNAi as do siRNA molecules and are expected to possess improved stability and activity in vivo; therefore, this discussion is not meant to be limiting only to siRNA and can be applied to siNA as a whole. By “improved capacity to mediate RNAi” or “improved RNAi activity” is meant to include RNAi activity measured in vitro and/or in vivo where the RNAi activity is a reflection of both the ability of the siNA to mediate RNAi and the stability of the siNAs of the invention. In this invention, the product of these activities can be increased in vitro and/or in vivo compared to an all RNA siRNA or a siNA containing a plurality of ribonucleotides. In some cases, the activity or stability of the siNA molecule can be decreased (i.e., less than ten-fold), but the overall activity of the siNA molecule is enhanced in vitro and/or in vivo.

[0333] RNA interference refers to the process of sequence specific post-transcriptional gene silencing in animals mediated by short interfering RNAs (siRNAs) (Fire et al., 1998, Nature, 391, 806). The corresponding process in plants is commonly referred to as post-transcriptional gene silencing or RNA silencing and is also referred to as quelling in fungi. The process of post-transcriptional gene silencing is thought to be an evolutionarily-conserved cellular defense mechanism used to prevent the expression of foreign genes which is commonly shared by diverse flora and phyla (Fire et al., 1999, Trends Genet., 15, 358). Such protection from foreign gene expression may have evolved in response to the production of double-stranded RNAs (dsRNAs) derived from viral infection or the random integration of transposon elements into a host genome via a cellular response that specifically destroys homologous single-stranded RNA or viral genomic RNA. The presence of dsRNA in cells triggers the RNAi response though a mechanism that has yet to be fully characterized. This mechanism appears to be different from the interferon response that results from dsRNA-mediated activation of protein kinase PKR and 2′,5′-oligoadenylate synthetase resulting in non-specific cleavage of mRNA by ribonuclease L.

[0334] The presence of long dsRNAs in cells stimulates the activity of a ribonuclease III enzyme referred to as Dicer. Dicer is involved in the processing of the dsRNA into short pieces of dsRNA known as short interfering RNAs (siRNAs) (Berstein et al., 2001, Nature, 409, 363). Short interfering RNAs derived from Dicer activity are typically about 21 to about 23 nucleotides in length and comprise about 19 base pair duplexes. Dicer has also been implicated in the excision of 21- and 22-nucleotide small temporal RNAs (stRNAs) from precursor RNA of conserved structure that are implicated in translational control (Hutvagner et al., 2001, Science, 293, 834). The RNAi response also features an endonuclease complex containing a siRNA, commonly referred to as an RNA-induced silencing complex (RISC), which mediates cleavage of single-stranded RNA having sequence homologous to the siRNA. Cleavage of the target RNA takes place in the middle of the region complementary to the guide sequence of the siRNA duplex (Elbashir et al., 2001, Genes Dev., 15, 188). In addition, RNA interference can also involve small RNA (e.g., micro-RNA or miRNA) mediated gene silencing, presumably though cellular mechanisms that regulate chromatin structure and thereby prevent transcription of target gene sequences (see for example Allshire, 2002, Science, 297, 1818-1819; Volpe et al., 2002, Science, 297, 1833-1837; Jenuwein, 2002, Science, 297, 2215-2218; and Hall et al., 2002, Science, 297, 2232-2237). As such, siNA molecules of the invention can be used to mediate gene silencing via interaction with RNA transcripts or alternately by interaction with particular gene sequences, wherein such interaction results in gene silencing either at the transcriptional level or post-transcriptional level.

[0335] RNAi has been studied in a variety of systems. Fire et al., 1998, Nature, 391, 806, were the first to observe RNAi in C. elegans. Wianny and Goetz, 1999, Nature Cell Biol., 2, 70, describe RNAi mediated by dsRNA in mouse embryos. Hammond et al., 2000, Nature, 404, 293, describe RNAi in Drosophila cells transfected with dsRNA. Elbashir et al., 2001, Nature, 411, 494, describe RNAi induced by introduction of duplexes of synthetic 21-nucleotide RNAs in cultured mammalian cells including human embryonic kidney and HeLa cells. Recent work in Drosophila embryonic lysates has revealed certain requirements for siRNA length, structure, chemical composition, and sequence that are essential to mediate efficient RNAi activity. These studies have shown that 21 nucleotide siRNA duplexes are most active when containing two 2-nucleotide 3′-terminal nucleotide overhangs. Furthermore, substitution of one or both siRNA strands with 2′-deoxy or 2′-O-methyl nucleotides abolishes RNAi activity, whereas substitution of 3′-terminal siRNA nucleotides with deoxy nucleotides was shown to be tolerated. Mismatch sequences in the center of the siRNA duplex were also shown to abolish RNAi activity. In addition, these studies also indicate that the position of the cleavage site in the target RNA is defined by the 5′-end of the siRNA guide sequence rather than the 3′-end (Elbashir et al., 2001, EMBO J., 20, 6877). Other studies have indicated that a 5′-phosphate on the target-complementary strand of a siRNA duplex is required for siRNA activity and that ATP is utilized to maintain the 5′-phosphate moiety on the siRNA (Nykanen et al., 2001, Cell, 107, 309); however, siRNA molecules lacking a 5′-phosphate are active when introduced exogenously, suggesting that 5′-phosphorylation of siRNA constructs may occur in vivo.

Duplex Forming Oligonucleotides (DFO) of the Invention

[0336] In one embodiment, the invention features siNA molecules comprising duplex forming oligonucleotides (DFO) that can self-assemble into double stranded oligonucleotides. The duplex forming oligonucleotides of the invention can be chemically synthesized or expressed from transcription units and/or vectors. The DFO molecules of the instant invention provide useful reagents and methods for a variety of therapeutic, diagnostic, agricultural, veterinary, target validation, genomic discovery, genetic engineering and pharmacogenomic applications.

[0337] Applicant demonstrates herein that certain oligonucleotides, refered to herein for convenience but not limitation as duplex forming oligonucleotides or DFO molecules, are potent mediators of sequence specific regulation of gene expression. The oligonucleotides of the invention are distinct from other nucleic acid sequences known in the art (e.g., siRNA, miRNA, stRNA, shRNA, antisense oligonucleotides etc.) in that they represent a class of linear polynucleotide sequences that are designed to self-assemble into double stranded oligonucleotides, where each strand in the double stranded oligonucleotides comprises a nucleotide sequence that is complementary to a target nucleic acid molecule. Nucleic acid molecules of the invention can thus self assemble into functional duplexes in which each strand of the duplex comprises the same polynucleotide sequence and each strand comprises a nucleotide sequence that is complementary to a target nucleic acid molecule.

[0338] Generally, double stranded oligonucleotides are formed by the assembly of two distinct oligonucleotide sequences where the oligonucleotide sequence of one strand is complementary to the oligonucleotide sequence of the second strand; such double stranded oligonucleotides are assembled from two separate oligonucleotides, or from a single molecule that folds on itself to form a double stranded structure, often referred to in the field as hairpin stem-loop structure (e.g., shRNA or short hairpin RNA). These double stranded oligonucleotides known in the art all have a common feature in that each strand of the duplex has a distict nucleotide sequence.

[0339] Distinct from the double stranded nucleic acid molecules known in the art, the applicants have developed a novel, potentially cost effective and simplified method of forming a double stranded nucleic acid molecule starting from a single stranded or linear oligonucleotide. The two strands of the double stranded oligonucleotide formed according to the instant invention have the same nucleotide sequence and are not covalently linked to each other. Such double-stranded oligonucleotides molecules can be readily linked post-synthetically by methods and reagents known in the art and are within the scope of the invention. In one embodiment, the single stranded oligonucleotide of the invention (the duplex forming oligonucleotide) that forms a double stranded oligonucleotide comprises a first region and a second region, where the second region includes a nucleotide sequence that is an inverted repeat of the nucleotide sequence in the first region, or a portion thereof, such that the single stranded oligonucleotide self assembles to form a duplex oligonucleotide in which the nucleotide sequence of one strand of the duplex is the same as the nucleotide sequence of the second strand. Non-limiting examples of such duplex forming oligonucleotides are illustrated in FIGS. 14 and 15. These duplex forming oligonucleotides (DFOs) can optionally include certain palindrome or repeat sequences where such palindrome or repeat sequences are present in between the first region and the second region of the DFO.

[0340] In one embodiment, the invention features a duplex forming oligonucleotide (DFO) molecule, wherein the DFO comprises a duplex forming self complementary nucleic acid sequence that has nucleotide sequence complementary to a repeat expansion (RE) target nucleic acid sequence. The DFO molecule can comprise a single self complementary sequence or a duplex resulting from assembly of such self complementary sequences.

[0341] In one embodiment, a duplex forming oligonucleotide (DFO) of the invention comprises a first region and a second region, wherein the second region comprises a nucleotide sequence comprising an inverted repeat of nucleotide sequence of the first region such that the DFO molecule can assemble into a double stranded oligonucleotide. Such double stranded oligonucleotides can act as a short interfering nucleic acid (siNA) to modulate gene expression. Each strand of the double stranded oligonucleotide duplex formed by DFO molecules of the invention can comprise a nucleotide sequence region that is complementary to the same nucleotide sequence in a target nucleic acid molecule (e.g., target repeat expansion (RE) RNA).

[0342] In one embodiment, the invention features a single stranded DFO that can assemble into a double stranded oligonucleotide. The applicant has surprisingly found that a single stranded oligonucleotide with nucleotide regions of self complementarity can readily assemble into duplex oligonucleotide constructs. Such DFOs can assemble into duplexes that can inhibit gene expression in a sequence specific manner. The DFO moleucles of the invention comprise a first region with nucleotide sequence that is complementary to the nucleotide sequence of a second region and where the sequence of the first region is complementary to a target nucleic acid (e.g., RNA). The DFO can form a double stranded oligonucleotide wherein a portion of each strand of the double stranded oligonucleotide comprises a sequence complementary to a target nucleic acid sequence.

[0343] In one embodiment, the invention features a double stranded oligonucleotide, wherein the two strands of the double stranded oligonucleotide are not covalently linked to each other, and wherein each strand of the double stranded oligonucleotide comprises a nucleotide sequence that is complementary to the same nucleotide sequence in a target nucleic acid molecule or a portion thereof (e.g., repeat expansion (RE) RNA target). In another embodiment, the two strands of the double stranded oligonucleotide share an identical nucleotide sequence of at least about 15, preferably at least about 16, 17, 18, 19, 20, or 21 nucleotides.

[0344] In one embodiment, a DFO molecule of the invention comprises a structure having Formula DFO-I:

5′-p-XZX′-3′

wherein Z comprises a palindromic or repeat nucleic acid sequence optionally with one or more modified nucleotides (e.g., nucleotide with a modified base, such as 2-amino purine, 2-amino-1,6-dihydro purine or a universal base), for example of length about 2 to about 24 nucleotides in even numbers (e.g., about 2, 4, 6, 8, 10, 12, 14, 16, 18, 20, or 22 or 24 nucleotides), X represents a nucleic acid sequence, for example of length of about 1 to about 21 nucleotides (e.g., about 1, 2, 3, 4, 5, 6, 7, 8, 9, 10, 11, 12, 13, 14, 15, 16, 17, 18, 19, 20, or 21 nucleotides), X′ comprises a nucleic acid sequence, for example of length about 1 and about 21 nucleotides (e.g., about 1, 2, 3, 4, 5, 6, 7, 8, 9, 10, 11, 12, 13, 14, 15, 16, 17, 18, 19, 20 or 21 nucleotides) having nucleotide sequence complementarity to sequence X or a portion thereof, p comprises a terminal phosphate group that can be present or absent, and wherein sequence X and Z, either independently or together, comprise nucleotide sequence that is complementary to a target nucleic acid sequence or a portion thereof and is of length sufficient to interact (e.g., base pair) with the target nucleic acid sequence or a portion thereof (e.g., repeat expansion (RE) RNA target). For example, X independently can comprise a sequence from about 12 to about 21 or more (e.g., about 12, 13, 14, 15, 16, 17, 18, 19, 20, 21, or more) nucleotides in length that is complementary to nucleotide sequence in a target repeat expansion (RE) RNA or a portion thereof. In another non-limiting example, the length of the nucleotide sequence of X and Z together, when X is present, that is complementary to the target RNA or a portion thereof (e.g., repeat expansion (RE) RNA target) is from about 12 to about 21 or more nucleotides (e.g., about 12, 13, 14, 15, 16, 17, 18, 19, 20, 21, or more). In yet another non-limiting example, when X is absent, the length of the nucleotide sequence of Z that is complementary to the target repeat expansion (RE) RNA or a portion thereof is from about 12 to about 24 or more nucleotides (e.g., about 12, 14, 16, 18, 20, 22, 24, or more). In one embodiment X, Z and X′ are independently oligonucleotides, where X and/or Z comprises a nucleotide sequence of length sufficient to interact (e.g., base pair) with a nucleotide sequence in the target RNA or a portion thereof (e.g., repeat expansion (RE) RNA target). In one embodiment, the lengths of oligonucleotides X and X′ are identical. In another embodiment, the lengths of oligonucleotides X and X′ are not identical. In another embodiment, the lengths of oligonucleotides X and Z, or Z and X′, or X, Z and X′ are either identical or different.

[0345] When a sequence is described in this specification as being of “sufficient” length to interact (i.e., base pair) with another sequence, it is meant that the the length is such that the number of bonds (e.g., hydrogen bonds) formed between the two sequences is enough to enable the two sequence to form a duplex under the conditions of interest. Such conditions can be in vitro (e.g., for diagnostic or assay purposes) or in vivo (e.g., for therapeutic purposes). It is a simple and routine matter to determine such lengths.

[0346] In one embodiment, the invention features a double stranded oligonucleotide construct having Formula DFO-I(a):

5′-p-XZX′-3′
3′-X′ZX-p-5′

wherein Z comprises a palindromic or repeat nucleic acid sequence or palindromic or repeat-like nucleic acid sequence with one or more modified nucleotides (e.g., nucleotides with a modified base, such as 2-amino purine, 2-amino-1,6-dihydro purine or a universal base), for example of length about 2 to about 24 nucleotides in even numbers (e.g., about 2, 4, 6, 8, 10, 12, 14, 16, 18, 20, 22 or 24 nucleotides), X represents a nucleic acid sequence, for example of length about 1 to about 21 nucleotides (e.g., about 1, 2, 3, 4, 5, 6, 7, 8, 9, 10, 11, 12, 13, 14, 15, 16, 17, 18, 19, 20, or 21 nucleotides), X′ comprises a nucleic acid sequence, for example of length about 1 to about 21 nucleotides (e.g., about 1, 2, 3, 4, 5, 6, 7, 8, 9, 10, 11, 12, 13, 14, 15, 16, 17, 18, 19, 20 or 21 nucleotides) having nucleotide sequence complementarity to sequence X or a portion thereof, p comprises a terminal phosphate group that can be present or absent, and wherein each X and Z independently comprises a nucleotide sequence that is complementary to a target nucleic acid sequence or a portion thereof (e.g., repeat expansion (RE) RNA target) and is of length sufficient to interact with the target nucleic acid sequence of a portion thereof (e.g., repeat expansion (RE) RNA target). For example, sequence X independently can comprise a sequence from about 12 to about 21 or more nucleotides (e.g., about 12, 13, 14, 15, 16, 17, 18, 19, 20, 21, or more) in length that is complementary to a nucleotide sequence in a target RNA or a portion thereof (e.g., repeat expansion (RE) RNA target). In another non-limiting example, the length of the nucleotide sequence of X and Z together (when X is present) that is complementary to the target repeat expansion (RE) RNA or a portion thereof is from about 12 to about 21 or more nucleotides (e.g., about 12, 13, 14, 15, 16, 17, 18, 19, 20, 21, or more). In yet another non-limiting example, when X is absent, the length of the nucleotide sequence of Z that is complementary to the target repeat expansion (RE) RNA or a portion thereof is from about 12 to about 24 or more nucleotides (e.g., about 12, 14, 16, 18, 20, 22, 24 or more). In one embodiment X, Z and X′ are independently oligonucleotides, where X and/or Z comprises a nucleotide sequence of length sufficient to interact (e.g., base pair) with nucleotide sequence in the target RNA or a portion thereof (e.g., repeat expansion (RE) RNA target). In one embodiment, the lengths of oligonucleotides X and X′ are identical. In another embodiment, the lengths of oligonucleotides X and X′ are not identical. In another embodiment, the lengths of oligonucleotides X and Z or Z and X′ or X, Z and X′ are either identical or different. In one embodiment, the double stranded oligonucleotide construct of Formula I(a) includes one or more, specifically 1, 2, 3 or 4, mismatches, to the extent such mismatches do not significantly diminish the ability of the double stranded oligonucleotide to inhibit target gene expression.

[0347] In one embodiment, a DFO molecule of the invention comprises structure having Formula DFO-II:

5′-p-XX′-3′

wherein each X and X′ are independently oligonucleotides of length about 12 nucleotides to about 21 nucleotides, wherein X comprises, for example, a nucleic acid sequence of length about 12 to about 21 nucleotides (e.g., about 12, 13, 14, 15, 16, 17, 18, 19, 20 or 21 nucleotides), X′ comprises a nucleic acid sequence, for example of length about 12 to about 21 nucleotides (e.g., about 12, 13, 14, 15, 16, 17, 18, 19, 20, or 21 nucleotides) having nucleotide sequence complementarity to sequence X or a portion thereof, p comprises a terminal phosphate group that can be present or absent, and wherein X comprises a nucleotide sequence that is complementary to a target nucleic acid sequence (e.g., repeat expansion (RE) RNA) or a portion thereof and is of length sufficient to interact (e.g., base pair) with the target nucleic acid sequence of a portion thereof. In one embodiment, the length of oligonucleotides X and X′ are identical. In another embodiment the length of oligonucleotides X and X′ are not identical. In one embodiment, length of the oligonucleotides X and X′ are sufficint to form a relatively stable double stranded oligonucleotide.

[0348] In one embodiment, the invention features a double stranded oligonucleotide construct having Formula DFO-II(a):

5′-p-XX′-3′
3′-X′X-p-5′

wherein each X and X′ are independently oligonucleotides of length about 12 nucleotides to about 21 nucleotides, wherein X comprises a nucleic acid sequence, for example of length about 12 to about 21 nucleotides (e.g., about 12, 13, 14, 15, 16, 17, 18, 19, 20 or 21 nucleotides), X′ comprises a nucleic acid sequence, for example of length about 12 to about 21 nucleotides (e.g., about 12, 13, 14, 15, 16, 17, 18, 19, 20 or 21 nucleotides) having nucleotide sequence complementarity to sequence X or a portion thereof, p comprises a terminal phosphate group that can be present or absent, and wherein X comprises nucleotide sequence that is complementary to a target nucleic acid sequence or a portion thereof (e.g., repeat expansion (RE) RNA target) and is of length sufficient to interact (e.g., base pair) with the target nucleic acid sequence (e.g., repeat expansion (RE) RNA) or a portion thereof. In one embodiment, the lengths of oligonucleotides X and X′ are identical. In another embodiment, the lengths of oligonucleotides X and X′ are not identical. In one embodiment, the lengths of the oligonucleotides X and X′ are sufficint to form a relatively stable double stranded oligonucleotide. In one embodiment, the double stranded oligonucleotide construct of Formula II(a) includes one or more, specifically 1, 2, 3 or 4, mismatches, to the extent such mismatches do not significantly diminish the ability of the double stranded oligonucleotide to inhibit target gene expression.

[0349] In one embodiment, the invention features a DFO molecule having Formula DFO-I(b):

5′-p-Z-3′

where Z comprises a palindromic or repeat nucleic acid sequence optionally including one or more non-standard or modified nucleotides (e.g., nucleotide with a modified base, such as 2-amino purine or a universal base) that can facilitate base-pairing with other nucleotides. Z can be, for example, of length sufficient to interact (e.g., base pair) with nucleotide sequence of a target nucleic acid (e.g., repeat expansion (RE) RNA) molecule, preferably of length of at least 12 nucleotides, specifically about 12 to about 24 nucleotides (e.g., about 12, 14, 16, 18, 20, 22 or 24 nucleotides). p represents a terminal phosphate group that can be present or absent.

[0350] In one embodiment, a DFO molecule having any of Formula DFO-I, DFO-I(a), DFO-I(b), DFO-II(a) or DFO-II can comprise chemical modifications as described herein without limitation, such as, for example, nucleotides having any of Formulae I-VII, stabilization chemistries as described in Table IV, or any other combination of modified nucleotides and non-nucleotides as described in the various embodiments herein.

[0351] In one embodiment, the palidrome or repeat sequence or modified nucleotide (e.g., nucleotide with a modified base, such as 2-amino purine or a universal base) in Z of DFO constructs having Formula DFO-I, DFO-I(a) and DFO-I(b), comprises chemically modified nucleotides that are able to interact with a portion of the target nucleic acid sequence (e.g., modified base analogs that can form Watson Crick base pairs or non-Watson Crick base pairs).

[0352] In one embodiment, a DFO molecule of the invention, for example a DFO having Formula DFO-I or DFO-II, comprises about 15 to about 40 nucleotides (e.g., about 15, 16, 17, 18, 19, 20, 21, 22, 23, 24, 25, 26, 27, 28, 29, 30, 31, 32, 33, 34, 35, 36, 37, 38, 39, or 40 nucleotides). In one embodiment, a DFO molecule of the invention comprises one or more chemical modifications. In a non-limiting example, the introduction of chemically modified nucleotides and/or non-nucleotides into nucleic acid molecules of the invention provides a powerful tool in overcoming potential limitations of in vivo stability and bioavailability inherent to unmodified RNA molecules that are delivered exogenously. For example, the use of chemically modified nucleic acid molecules can enable a lower dose of a particular nucleic acid molecule for a given therapeutic effect since chemically modified nucleic acid molecules tend to have a longer half-life in serum or in cells or tissues. Furthermore, certain chemical modifications can improve the bioavailability and/or potency of nucleic acid molecules by not only enhancing half-life but also facilitating the targeting of nucleic acid molecules to particular organs, cells or tissues and/or improving cellular uptake of the nucleic acid molecules. Therefore, even if the activity of a chemically modified nucleic acid molecule is reduced in vitro as compared to a native/unmodified nucleic acid molecule, for example when compared to an unmodified RNA molecule, the overall activity of the modified nucleic acid molecule can be greater than the native or unmodified nucleic acid molecule due to improved stability, potency, duration of effect, bioavailability and/or delivery of the molecule.

Multifunctional or Multi-Targeted siNA Molecules of the Invention

[0353] In one embodiment, the invention features siNA molecules comprising multifunctional short interfering nucleic acid (multifunctional siNA) molecules that modulate the expression of one or more genes in a biologic system, such as a cell, tissue, or organism. The multifunctional short interfering nucleic acid (multifunctional siNA) molecules of the invention can target more than one region a repeat expansion (RE) target nucleic acid sequence or can target sequences of more than one distinct target nucleic acid molecules. The multifunctional siNA molecules of the invention can be chemically synthesized or expressed from transcription units and/or vectors. The multifunctional siNA molecules of the instant invention provide useful reagents and methods for a variety of human applications, therapeutic, cosmetic, diagnostic, agricultural, veterinary, target validation, genomic discovery, genetic engineering and pharmacogenomic applications.

[0354] Applicant demonstrates herein that certain oligonucleotides, refered to herein for convenience but not limitation as multifunctional short interfering nucleic acid or multifunctional siNA molecules, are potent mediators of sequence specific regulation of gene expression. The multifunctional siNA molecules of the invention are distinct from other nucleic acid sequences known in the art (e.g., siRNA, miRNA, stRNA, shRNA, antisense oligonucleotides, etc.) in that they represent a class of polynucleotide molecules that are designed such that each strand in the multifunctional siNA construct comprises a nucleotide sequence that is complementary to a distinct nucleic acid sequence in one or more target nucleic acid molecules. A single multifunctional siNA molecule (generally a double-stranded molecule) of the invention can thus target more than one (e.g., 2, 3, 4, 5, or more) differing target nucleic acid target molecules. Nucleic acid molecules of the invention can also target more than one (e.g., 2, 3, 4, 5, or more) region of the same target nucleic acid sequence. As such multifunctional siNA molecules of the invention are useful in down regulating or inhibiting the expression of one or more target nucleic acid molecules. By reducing or inhibiting expression of more than one target nucleic acid molecule with one multifunctional siNA construct, multifunctional siNA molecules of the invention represent a class of potent therapeutic agents that can provide simultaneous inhibition of multiple targets within a disease or pathogen related pathway. Such simultaneous inhibition can provide synergistic therapeutic treatment strategies without the need for separate preclinical and clinical development efforts or complex regulatory approval process.

[0355] Use of multifunctional siNA molecules that target more then one region of a target nucleic acid molecule (e.g., messenger RNA) is expected to provide potent inhibition of gene expression. For example, a single multifunctional siNA construct of the invention can target both conserved and variable regions of a target nucleic acid molecule, such as repeat expansion (RE) target RNA or DNA, thereby allowing down regulation or inhibition of different splice variants encoded by a single gene, or allowing for targeting of both coding and non-coding regions of a target nucleic acid molecule.

[0356] Generally, double stranded oligonucleotides are formed by the assembly of two distinct oligonucleotides where the oligonucleotide sequence of one strand is complementary to the oligonucleotide sequence of the second strand; such double stranded oligonucleotides are generally assembled from two separate oligonucleotides (e.g., siRNA). Alternately, a duplex can be formed from a single molecule that folds on itself (e.g., shRNA or short hairpin RNA). These double stranded oligonucleotides are known in the art to mediate RNA interference and all have a common feature wherein only one nucleotide sequence region (guide sequence or the antisense sequence) has complementarity to a target nucleic acid sequence, such as repeat expansion (RE) targets, and the other strand (sense sequence) comprises nucleotide sequence that is homologous to the target nucleic acid sequence. Generally, the antisense sequence is retained in the active RISC complex and guides the RISC to the target nucleotide sequence by means of complementary base-pairing of the antisense sequence with the target seqeunce for mediating sequence-specific RNA interference. It is known in the art that in some cell culture systems, certain types of unmodified siRNAs can exhibit “off target” effects. It is hypothesized that this off-target effect involves the participation of the sense sequence instead of the antisense sequence of the siRNA in the RISC complex (see for example Schwarz et al., 2003, Cell, 115, 199-208). In this instance the sense sequence is believed to direct the RISC complex to a sequence (off-target sequence) that is distinct from the intended target sequence, resulting in the inhibition of the off-target sequence. In these double stranded nucleic acid molecules, each strand is complementary to a distinct target nucleic acid sequence. However, the off-targets that are affected by these dsRNAs are not entirely predictable and are non-specific.

[0357] Distinct from the double stranded nucleic acid molecules known in the art, the applicants have developed a novel, potentially cost effective and simplified method of down regulating or inhibiting the expression of more than one target nucleic acid sequence using a single multifunctional siNA construct. The multifunctional siNA molecules of the invention are designed to be double-stranded or partially double stranded, such that a portion of each strand or region of the multifunctional siNA is complementary to a target nucleic acid sequence of choice. As such, the multifunctional siNA molecules of the invention are not limited to targeting sequences that are complementary to each other, but rather to any two differing target nucleic acid sequences. Multifunctional siNA molecules of the invention are designed such that each strand or region of the multifunctional siNA molecule, that is complementary to a given target nucleic acid sequence, is of suitable length (e.g., from about 16 to about 28 nucleotides in length, preferably from about 18 to about 28 nucleotides in length) for mediating RNA interference against the target nucleic acid sequence. The complementarity between the target nucleic acid sequence and a strand or region of the multifunctional siNA must be sufficient (at least about 8 base pairs) for cleavage of the target nucleic acid sequence by RNA interference. Multifunctional siNA of the invention is expected to minimize off-target effects seen with certain siRNA sequences, such as those described in (Schwarz et al., supra).

[0358] It has been reported that dsRNAs of length between 29 base pairs and 36 base pairs (Tuschl et al., International PCT Publication No. WO 02/44321) do not mediate RNAi. One reason these dsRNAs are inactive may be the lack of turnover or dissociation of the strand that interacts with the target RNA sequence, such that the RISC complex is not able to efficiently interact with multiple copies of the target RNA resulting in a significant decrease in the potency and efficiency of the RNAi process. Applicant has surprisingly found that the multifunctional siNAs of the invention can overcome this hurdle and are capable of enhancing the efficiency and potency of RNAi process. As such, in certain embodiments of the invention, multifunctional siNAs of length of about 29 to about 36 base pairs can be designed such that, a portion of each strand of the multifunctional siNA molecule comprises a nucleotide sequence region that is complementary to a target nucleic acid of length sufficient to mediate RNAi efficiently (e.g., about 15 to about 23 base pairs) and a nucleotide sequence region that is not complementary to the target nucleic acid. By having both complementary and non-complementary portions in each strand of the multifunctional siNA, the multifunctional siNA can mediate RNA interference against a target nucleic acid sequence without being prohibitive to turnover or dissociation (e.g., where the length of each strand is too long to mediate RNAi against the respective target nucleic acid sequence). Furthermore, design of multifunctional siNA molecules of the invention with internal overlapping regions allows the multifunctional siNA molecules to be of favorable (decreased) size for mediating RNA interference and of size that is well suited for use as a therapeutic agent (e.g., wherein each strand is independently from about 18 to about 28 nucleotides in length). Non-limiting examples are illustrated in FIGS. 16-28.

[0359] In one embodiment, a multifunctional siNA molecule of the invention comprises a first region and a second region, where the first region of the multifunctional siNA comprises a nucleotide sequence complementary to a nucleic acid sequence of a first target nucleic acid molecule, and the second region of the multifunctional siNA comprises nucleic acid sequence complementary to a nucleic acid sequence of a second target nucleic acid molecule. In one embodiment, a multifunctional siNA molecule of the invention comprises a first region and a second region, where the first region of the multifunctional siNA comprises nucleotide sequence complementary to a nucleic acid sequence of the first region of a target nucleic acid molecule, and the second region of the multifunctional siNA comprises nucleotide sequence complementary to a nucleic acid sequence of a second region of a the target nucleic acid molecule. In another embodiment, the first region and second region of the multifunctional siNA can comprise separate nucleic acid sequences that share some degree of complementarity (e.g., from about 1 to about 10 complementary nucleotides). In certain embodiments, multifunctional siNA constructs comprising separate nucleic acid seqeunces can be readily linked post-synthetically by methods and reagents known in the art and such linked constructs are within the scope of the invention. Alternately, the first region and second region of the multifunctional siNA can comprise a single nucleic acid sequence having some degree of self complementarity, such as in a hairpin or stem-loop structure. Non-limiting examples of such double stranded and hairpin multifunctional short interfering nucleic acids are illustrated in FIGS. 16 and 17 respectively. These multifunctional short interfering nucleic acids (multifunctional siNAs) can optionally include certain overlapping nucleotide sequence where such overlapping nucleotide sequence is present in between the first region and the second region of the multifunctional siNA (see for example FIGS. 18 and 19).

[0360] In one embodiment, the invention features a multifunctional short interfering nucleic acid (multifunctional siNA) molecule, wherein each strand of the the multifunctional siNA independently comprises a first region of nucleic acid sequence that is complementary to a distinct target nucleic acid sequence and the second region of nucleotide sequence that is not complementary to the target sequence. The target nucleic acid sequence of each strand is in the same target nucleic acid molecule or different target nucleic acid molecules.

[0361] In another embodiment, the multifunctional siNA comprises two strands, where: (a) the first strand comprises a region having sequence complementarity to a target nucleic acid sequence (complementary region 1) and a region having no sequence complementarity to the target nucleotide sequence (non-complementary region 1); (b) the second strand of the multifunction siNA comprises a region having sequence complementarity to a target nucleic acid sequence that is distinct from the target nucleotide sequence complementary to the first strand nucleotide sequence (complementary region 2), and a region having no sequence complementarity to the target nucleotide sequence of complementary region 2 (non-complementary region 2); (c) the complementary region 1 of the first strand comprises a nucleotide sequence that is complementary to a nucleotide sequence in the non-complementary region 2 of the second strand and the complementary region 2 of the second strand comprises a nucleotide sequence that is complementary to a nucleotide sequence in the non-complementary region 1 of the first strand. The target nucleic acid sequence of complementary region 1 and complementary region 2 is in the same target nucleic acid molecule or different target nucleic acid molecules.

[0362] In another embodiment, the multifunctional siNA comprises two strands, where: (a) the first strand comprises a region having sequence complementarity to a target nucleic acid sequence derived from a gene, such as repeat expansion (RE) (complementary region 1) and a region having no sequence complementarity to the target nucleotide sequence of complementary region 1 (non-complementary region 1); (b) the second strand of the multifunction siNA comprises a region having sequence complementarity to a target nucleic acid sequence derived from a gene that is distinct from the gene of complementary region 1 (complementary region 2), and a region having no sequence complementarity to the target nucleotide sequence of complementary region 2 (non-complementary region 2); (c) the complementary region 1 of the first strand comprises a nucleotide sequence that is complementary to a nucleotide sequence in the non-complementary region 2 of the second strand and the complementary region 2 of the second strand comprises a nucleotide sequence that is complementary to a nucleotide sequence in the non-complementary region 1 of the first strand.

[0363] In another embodiment, the multifunctional siNA comprises two strands, where: (a) the first strand comprises a region having sequence complementarity to a target nucleic acid sequence derived from a gene, such as repeat expansion (RE), (complementary region 1) and a region having no sequence complementarity to the target nucleotide sequence of complementary region 1 (non-complementary region 1); (b) the second strand of the multifunction siNA comprises a region having sequence complementarity to a target nucleic acid sequence distinct from the target nucleic acid sequence of complementary region 1 (complementary region 2), provided, however, that the target nucleic acid sequence for complementary region 1 and target nucleic acid sequence for complementary region 2 are both derived from the same gene, and a region having no sequence complementarity to the target nucleotide sequence of complementary region 2 (non-complementary region 2); (c) the complementary region 1 of the first strand comprises a nucleotide sequence that is complementary to a nucleotide sequence in the non-complementary region 2 of the second strand and the complementary region 2 of the second strand comprises a nucleotide sequence that is complementary to nucleotide sequence in the non-complementary region 1 of the first strand.

[0364] In one embodiment, the invention features a multifunctional short interfering nucleic acid (multifunctional siNA) molecule, wherein the multifunctional siNA comprises two complementary nucleic acid sequences in which the first sequence comprises a first region having nucleotide sequence complementary to nucleotide sequence within a target nucleic acid molecule, and in which the second seqeunce comprises a first region having nucleotide sequence complementary to a distinct nucleotide sequence within the same target nucleic acid molecule. Preferably, the first region of the first sequence is also complementary to the nucleotide sequence of the second region of the second sequence, and where the first region of the second sequence is complementary to the nucleotide sequence of the second region of the first sequence.

[0365] In one embodiment, the invention features a multifunctional short interfering nucleic acid (multifunctional siNA) molecule, wherein the multifunctional siNA comprises two complementary nucleic acid sequences in which the first sequence comprises a first region having a nucleotide sequence complementary to a nucleotide sequence within a first target nucleic acid molecule, and in which the second seqeunce comprises a first region having a nucleotide sequence complementary to a distinct nucleotide sequence within a second target nucleic acid molecule. Preferably, the first region of the first sequence is also complementary to the nucleotide sequence of the second region of the second sequence, and where the first region of the second sequence is complementary to the nucleotide sequence of the second region of the first sequence.

[0366] In one embodiment, the invention features a multifunctional siNA molecule comprising a first region and a second region, where the first region comprises a nucleic acid sequence having about 18 to about 28 nucleotides complementary to a nucleic acid sequence within a first target nucleic acid molecule, and the second region comprises nucleotide sequence having about 18 to about 28 nucleotides complementary to a distinct nucleic acid sequence within a second target nucleic acid molecule.

[0367] In one embodiment, the invention features a multifunctional siNA molecule comprising a first region and a second region, where the first region comprises nucleic acid sequence having about 18 to about 28 nucleotides complementary to a nucleic acid sequence within a target nucleic acid molecule, and the second region comprises nucleotide sequence having about 18 to about 28 nucleotides complementary to a distinct nucleic acid sequence within the same target nucleic acid molecule.

[0368] In one embodiment, the invention features a double stranded multifunctional short interfering nucleic acid (multifunctional siNA) molecule, wherein one strand of the multifunctional siNA comprises a first region having nucleotide sequence complementary to a first target nucleic acid sequence, and the second strand comprises a first region having a nucleotide sequence complementary to a second target nucleic acid sequence. The first and second target nucleic acid sequences can be present in separate target nucleic acid molecules or can be different regions within the same target nucleic acid molecule. As such, multiifunctional siNA molecules of the invention can be used to target the expression of different genes, splice variants of the same gene, both mutant and conserved regions of one or more gene transcripts, or both coding and non-coding sequences of the same or differeing genes or gene transcripts.

[0369] In one embodiment, a target nucleic acid molecule of the invention encodes a single protein. In another embodiment, a target nucleic acid molecule encodes more than one protein (e.g., 1, 2, 3, 4, 5 or more proteins). As such, a multifunctional siNA construct of the invention can be used to down regulate or inhibit the expression of several proteins. For example, a multifunctional siNA molecule comprising a region in one strand having nucleotide sequence complementarity to a first target nucleic acid sequence derived from a gene encoding one protein and the second strand comprising a region with nucleotide sequence complementarity to a second target nucleic acid sequence present in target nucleic acid molecules derived from genes encoding two or more proteins (e.g., two or more differing repeat expansion (RE) target sequences) can be used to down regulate, inhibit, or shut down a particular biologic pathway.by targeting, for example, two or more targets involved in a biologic pathway.

[0370] In one embodiment the invention takes advantage of conserved nucleotide sequences present in different isoforms of cytokines or ligands and receptors for the cytokines or ligands. By designing multifunctional siNAs in a manner where one strand includes a sequence that is complementary to a target nucleic acid sequence conserved among various isoforms of a cytokine and the other strand includes sequence that is complementary to a target nucleic acid sequence conserved among the receptors for the cytokine, it is possible to selectively and effectively modulate or inhibit a biological pathway or multiple genes in a biological pathway using a single multifunctional siNA.

[0371] In one embodiment, a double stranded multifunctional siNA molecule of the invention comprises a structure having Formula MF-I:

5′-p-XZX′-3′
3′-Y′ZY-p-5′

wherein each 5′-p-XZX′-3′ and 5′-p-YZY′-3′ are independently an oligonucleotide of length of about 20 nucleotides to about 300 nucleotides, preferably of about 20 to about 200 nucleotides, about 20 to about 100 nucleotides, about 20 to about 40 nucleotides, about 20 to about 40 nucleotides, about 24 to about 38 nucleotides, or about 26 to about 38 nucleotides; XZ comprises a nucleic acid sequence that is complementary to a first target nucleic acid sequence; YZ is an oligonucleotide comprising nucleic acid sequence that is complementary to a second target nucleic acid sequence; Z comprises nucleotide sequence of length about 1 to about 24 nucleotides (e.g., about 1, 2, 3, 4, 5, 6, 7, 8, 9, 10, 11, 12, 13, 14, 15, 16, 17, 18, 19, 20, 21, 22, 23, or 24 nucleotides) that is self complimentary; X comprises nucleotide sequence of length about 1 to about 100 nucleotides, preferably about 1 to about 21 nucleotides (e.g., about 1, 2, 3, 4, 5, 6, 7, 8, 9, 10, 11, 12, 13, 14, 15, 16, 17, 18, 19, 20, or 21 nucleotides) that is complementary to nucleotide sequence present in region Y′; Y comprises nucleotide sequence of length about 1 to about 100 nucleotides, prefereably about 1- about 21 nucleotides (e.g., about 1, 2, 3, 4, 5, 6, 7, 8, 9, 10, 11, 12, 13, 14, 15, 16, 17, 18, 19, 20 or 21 nucleotides) that is complementary to nucleotide sequence present in region X′; each p comprises a terminal phosphate group that is independently present or absent; each XZ and YZ is independently of length sufficient to stably interact (i.e., base pair) with the first and second target nucleic acid sequence, respectively, or a portion thereof. For example, each sequence X and Y can independently comprise sequence from about 12 to about 21 or more nucleotides in length (e.g., about 12, 13, 14, 15, 16, 17, 18, 19, 20, 21, or more) that is complementary to a target nucleotide sequence in different target nucleic acid molecules, such as target RNAs or a portion thereof. In another non-limiting example, the length of the nucleotide sequence of X and Z together that is complementary to the first target nucleic acid sequence or a portion thereof is from about 12 to about 21 or more nucleotides (e.g., about 12, 13, 14, 15, 16, 17, 18, 19, 20, 21, or more). In another non-limiting example, the length of the nucleotide sequence of Y and Z together, that is complementary to the second target nucleic acid sequence or a portion thereof is from about 12 to about 21 or more nucleotides (e.g., about 12, 13, 14, 15, 16, 17, 18, 19, 20, 21, or more). In one embodiment, the first target nucleic acid sequence and the second target nucleic acid sequence are present in the same target nucleic acid molecule (e.g., repeat expansion (RE) RNA). In another embodiment, the first target nucleic acid sequence and the second target nucleic acid sequence are present in different target nucleic acid molecules (e.g., repeat expansion (RE) targets). In one embodiment, Z comprises a palindrome or a repeat sequence. In one embodiment, the lengths of oligonucleotides X and X′ are identical. In another embodiment, the lengths of oligonucleotides X and X′ are not identical. In one embodiment, the lengths of oligonucleotides Y and Y′ are identical. In another embodiment, the lengths of oligonucleotides Y and Y′ are not identical. In one embodiment, the double stranded oligonucleotide construct of Formula I(a) includes one or more, specifically 1, 2, 3 or 4, mismatches, to the extent such mismatches do not significantly diminish the ability of the double stranded oligonucleotide to inhibit target gene expression.

[0372] In one embodiment, a multifunctional siNA molecule of the invention comprises a structure having Formula MF-II:

5′-p-XX′-3′
3′-Y′Y-p-5′

wherein each 5′-p-XX′-3′ and 5′-p-YY′-3′ are independently an oligonucleotide of length of about 20 nucleotides to about 300 nucleotides, preferably about 20 to about 200 nucleotides, about 20 to about 100 nucleotides, about 20 to about 40 nucleotides, about 20 to about 40 nucleotides, about 24 to about 38 nucleotides, or about 26 to about 38 nucleotides; X comprises a nucleic acid sequence that is complementary to a first target nucleic acid sequence; Y is an oligonucleotide comprising nucleic acid sequence that is complementary to a second target nucleic acid sequence; X comprises a nucleotide sequence of length about 1 to about 100 nucleotides, preferably about 1 to about 21 nucleotides (e.g., about 1, 2, 3, 4, 5, 6, 7, 8, 9, 10, 11, 12, 13, 14, 15, 16, 17, 18, 19, 20, or 21 nucleotides) that is complementary to nucleotide sequence present in region Y′; Y comprises nucleotide sequence of length about 1 to about 100 nucleotides, prefereably about 1 to about 21 nucleotides (e.g., about 1, 2, 3, 4, 5, 6, 7, 8, 9, 10, 11, 12, 13, 14, 15, 16, 17, 18, 19, 20 or 21 nucleotides) that is complementary to nucleotide sequence present in region X′; each p comprises a terminal phosphate group that is independently present or absent; each X and Y independently is of length sufficient to stably interact (i.e., base pair) with the first and second target nucleic acid sequence, respectively, or a portion thereof. For example, each sequence X and Y can independently comprise sequence from about 12 to about 21 or more nucleotides in length (e.g., about 12, 13, 14, 15, 16, 17, 18, 19, 20, 21, or more) that is complementary to a target nucleotide sequence in different target nucleic acid molecules, such as repeat expansion, RBL1, and RBL2, target sequences or a portion thereof. In one embodiment, the first target nucleic acid sequence and the second target nucleic acid sequence are present in the same target nucleic acid molecule (e.g., repeat expansion (RE) RNA or DNA). In another embodiment, the first target nucleic acid sequence and the second target nucleic acid sequence are present in different target nucleic acid molecules, such as repeat expansion, RBL1, and RBL2, target sequences or a portion thereof. In one embodiment, Z comprises a palindrome or a repeat sequence. In one embodiment, the lengths of oligonucleotides X and X′ are identical. In another embodiment, the lengths of oligonucleotides X and X′ are not identical. In one embodiment, the lengths of oligonucleotides Y and Y′ are identical. In another embodiment, the lengths of oligonucleotides Y and Y′ are not identical. In one embodiment, the double stranded oligonucleotide construct of Formula I(a) includes one or more, specifically 1, 2, 3 or 4, mismatches, to the extent such mismatches do not significantly diminish the ability of the double stranded oligonucleotide to inhibit target gene expression.

[0373] In one embodiment, a multifunctional siNA molecule of the invention comprises a structure having Formula MF-III:

X X′
Y′-W-Y

wherein each X, X′, Y, and Y′ is independently an oligonucleotide of length of about 15 nucleotides to about 50 nucleotides, preferably about 18 to about 40 nucleotides, or about 19 to about 23 nucleotides; X comprises nucleotide sequence that is complementary to nucleotide sequence present in region Y′; X′ comprises nucleotide sequence that is complementary to nucleotide sequence present in region Y; each X and X′ is independently of length sufficient to stably interact (i.e., base pair) with a first and a second target nucleic acid sequence, respectively, or a portion thereof; W represents a nucleotide or non-nucleotide linker that connects sequences Y′ and Y; and the multifunctional siNA directs cleavage of the first and second target sequence via RNA interference. In one embodiment, the first target nucleic acid sequence and the second target nucleic acid sequence are present in the same target nucleic acid molecule (e.g., repeat expansion (RE) RNA). In another embodiment, the first target nucleic acid sequence and the second target nucleic acid sequence are present in different target nucleic acid molecules such as repeat expansion, RBL1, and RBL2, target sequences or a portion thereof. In one embodiment, region W connects the 3′-end of sequence Y′ with the 3′-end of sequence Y. In one embodiment, region W connects the 3′-end of sequence Y′ with the 5′-end of sequence Y. In one embodiment, region W connects the 5′-end of sequence Y′ with the 5′-end of sequence Y. In one embodiment, region W connects the 5′-end of sequence Y′ with the 3′-end of sequence Y. In one embodiment, a terminal phosphate group is present at the 5′-end of sequence X. In one embodiment, a terminal phosphate group is present at the 5′-end of sequence X′. In one embodiment, a terminal phosphate group is present at the 5′-end of sequence Y. In one embodiment, a terminal phosphate group is present at the 5′-end of sequence Y′. In one embodiment, W connects sequences Y and Y′ via a biodegradable linker. In one embodiment, W further comprises a conjugate, label, aptamer, ligand, lipid, or polymer.

[0374] In one embodiment, a multifunctional siNA molecule of the invention comprises a structure having Formula MF-IV:

X X′
Y′-W-Y

wherein each X, X′, Y, and Y′ is independently an oligonucleotide of length of about 15 nucleotides to about 50 nucleotides, preferably about 18 to about 40 nucleotides, or about 19 to about 23 nucleotides; X comprises nucleotide sequence that is complementary to nucleotide sequence present in region Y′; X′ comprises nucleotide sequence that is complementary to nucleotide sequence present in region Y; each Y and Y′ is independently of length sufficient to stably interact (i.e., base pair) with a first and a second target nucleic acid sequence, respectively, or a portion thereof; W represents a nucleotide or non-nucleotide linker that connects sequences Y′ and Y; and the multifunctional siNA directs cleavage of the first and second target sequence via RNA interference. In one embodiment, the first target nucleic acid sequence and the second target nucleic acid sequence are present in the same target nucleic acid molecule (e.g., repeat expansion (RE) RNA). In another embodiment, the first target nucleic acid sequence and the second target nucleic acid sequence are present in different target nucleic acid molecules, such as repeat expansion, RBL1, and RBL2, target sequences or a portion thereof. In one embodiment, region W connects the 3′-end of sequence Y′ with the 3′-end of sequence Y. In one embodiment, region W connects the 3′-end of sequence Y′ with the 5′-end of sequence Y. In one embodiment, region W connects the 5′-end of sequence Y′ with the 5′-end of sequence Y. In one embodiment, region W connects the 5′-end of sequence Y′ with the 3′-end of sequence Y. In one embodiment, a terminal phosphate group is present at the 5′-end of sequence X. In one embodiment, a terminal phosphate group is present at the 5′-end of sequence X′. In one embodiment, a terminal phosphate group is present at the 5′-end of sequence Y. In one embodiment, a terminal phosphate group is present at the 5′-end of sequence Y′. In one embodiment, W connects sequences Y and Y′ via a biodegradable linker. In one embodiment, W further comprises a conjugate, label, aptamer, ligand, lipid, or polymer.

[0375] In one embodiment, a multifunctional siNA molecule of the invention comprises a structure having Formula MF-V:

X X′
Y′-W-Y

wherein each X, X′, Y, and Y′ is independently an oligonucleotide of length of about 15 nucleotides to about 50 nucleotides, preferably about 18 to about 40 nucleotides, or about 19 to about 23 nucleotides; X comprises nucleotide sequence that is complementary to nucleotide sequence present in region Y′; X′ comprises nucleotide sequence that is complementary to nucleotide sequence present in region Y; each X, X′, Y, or Y′ is independently of length sufficient to stably interact (i.e., base pair) with a first, second, third, or fourth target nucleic acid sequence, respectively, or a portion thereof; W represents a nucleotide or non-nucleotide linker that connects sequences Y′ and Y; and the multifunctional siNA directs cleavage of the first, second, third, and/or fourth target sequence via RNA interference. In one embodiment, the first, second, third and fourth target nucleic acid sequence are all present in the same target nucleic acid molecule (e.g., repeat expansion (RE) RNA). In another embodiment, the first, second, third and fourth target nucleic acid sequence are independently present in different target nucleic acid molecules, such as repeat expansion, RBL1, and RBL2, target sequences or a portion thereof. In one embodiment, region W connects the 3′-end of sequence Y′ with the 3′-end of sequence Y. In one embodiment, region W connects the 3′-end of sequence Y′ with the 5′-end of sequence Y. In one embodiment, region W connects the 5′-end of sequence Y′ with the 5′-end of sequence Y. In one embodiment, region W connects the 5′-end of sequence Y′ with the 3′-end of sequence Y. In one embodiment, a terminal phosphate group is present at the 5′-end of sequence X. In one embodiment, a terminal phosphate group is present at the 5′-end of sequence X′. In one embodiment, a terminal phosphate group is present at the 5′-end of sequence Y. In one embodiment, a terminal phosphate group is present at the 5′-end of sequence Y′. In one embodiment, W connects sequences Y and Y′ via a biodegradable linker. In one embodiment, W further comprises a conjugate, label, aptamer, ligand, lipid, or polymer.

[0376] In one embodiment, regions X and Y of multifunctional siNA molecule of the invention (e.g., having any of Formula MF-I-MF-V), are complementary to different target nucleic acid sequences that are portions of the same target nucleic acid molecule. In one embodiment, such target nucleic acid sequences are at different locations within the coding region of a RNA transcript. In one embodiment, such target nucleic acid sequences comprise coding and non-coding regions of the same RNA transcript. In one embodiment, such target nucleic acid sequences comprise regions of alternately spliced transcripts or precursors of such alternately spliced transcripts.

[0377] In one embodiment, a multifunctional siNA molecule having any of Formula MF-I-MF-V can comprise chemical modifications as described herein without limitation, such as, for example, nucleotides having any of Formulae I-VII described herein, stabilization chemistries as described in Table IV, or any other combination of modified nucleotides and non-nucleotides as described in the various embodiments herein.

[0378] In one embodiment, the palidrome or repeat sequence or modified nucleotide (e.g., nucleotide with a modified base, such as 2-amino purine or a universal base) in Z of multifunctional siNA constructs having Formula MF-I or MF-II comprises chemically modified nucleotides that are able to interact with a portion of the target nucleic acid sequence (e.g., modified base analogs that can form Watson Crick base pairs or non-Watson Crick base pairs).

[0379] In one embodiment, a multifunctional siNA molecule of the invention, for example each strand of a multifunctional siNA having MF-I-MF-V, independently comprises about 15 to about 40 nucleotides (e.g., about 15, 16, 17, 18, 19, 20, 21, 22, 23, 24, 25, 26, 27, 28, 29, 30, 31, 32, 33, 34, 35, 36, 37, 38, 39, or 40 nucleotides). In one embodiment, a multifunctional siNA molecule of the invention comprises one or more chemical modifications. In a non-limiting example, the introduction of chemically modified nucleotides and/or non-nucleotides into nucleic acid molecules of the invention provides a powerful tool in overcoming potential limitations of in vivo stability and bioavailability inherent to unmodified RNA molecules that are delivered exogenously. For example, the use of chemically modified nucleic acid molecules can enable a lower dose of a particular nucleic acid molecule for a given therapeutic effect since chemically modified nucleic acid molecules tend to have a longer half-life in serum or in cells or tissues. Furthermore, certain chemical modifications can improve the bioavailability and/or potency of nucleic acid molecules by not only enhancing half-life but also facilitating the targeting of nucleic acid molecules to particular organs, cells or tissues and/or improving cellular uptake of the nucleic acid molecules. Therefore, even if the activity of a chemically modified nucleic acid molecule is reduced in vitro as compared to a native/unmodified nucleic acid molecule, for example when compared to an unmodified RNA molecule, the overall activity of the modified nucleic acid molecule can be greater than the native or unmodified nucleic acid molecule due to improved stability, potency, duration of effect, bioavailability and/or delivery of the molecule.

[0380] In another embodiment, the invention features multifunctional siNAs, wherein the multifunctional siNAs are assembled from two separate double-stranded siNAs, with one of the ends of each sense strand is tethered to the end of the sense strand of the other siNA molecule, such that the two antisense siNA strands are annealed to their corresponding sense strand that are tethered to each other at one end (see FIG. 22). The tethers or linkers can be nucleotide-based linkers or non-nucleotide based linkers as generally known in the art and as described herein.

[0381] In one embodiment, the invention features a multifunctional siNA, wherein the multifunctional siNA is assembled from two separate double-stranded siNAs, with the 5′-end of one sense strand of the siNA is tethered to the 5′-end of the sense strand of the other siNA molecule, such that the 5′-ends of the two antisense siNA strands, annealed to their corresponding sense strand that are tethered to each other at one end, point away (in the opposite direction) from each other (see FIG. 22 (A)). The tethers or linkers can be nucleotide-based linkers or non-nucleotide based linkers as generally known in the art and as described herein.

[0382] In one embodiment, the invention features a multifunctional siNA, wherein the multifunctional siNA is assembled from two separate double-stranded siNAs, with the 3′-end of one sense strand of the siNA is tethered to the 3′-end of the sense strand of the other siNA molecule, such that the 5′-ends of the two antisense siNA strands, annealed to their corresponding sense strand that are tethered to each other at one end, face each other (see FIG. 22 (B)). The tethers or linkers can be nucleotide-based linkers or non-nucleotide based linkers as generally known in the art and as described herein.

[0383] In one embodiment, the invention features a multifunctional siNA, wherein the multifunctional siNA is assembled from two separate double-stranded siNAs, with the 5′-end of one sense strand of the siNA is tethered to the 3′-end of the sense strand of the other siNA molecule, such that the 5′-end of the one of the antisense siNA strands annealed to their corresponding sense strand that are tethered to each other at one end, faces the 3′-end of the other antisense strand (see FIG. 22 (C-D)). The tethers or linkers can be nucleotide-based linkers or non-nucleotide based linkers as generally known in the art and as described herein.

[0384] In one embodiment, the invention features a multifunctional siNA, wherein the multifunctional siNA is assembled from two separate double-stranded siNAs, with the 5′-end of one antisense strand of the siNA is tethered to the 3′-end of the antisense strand of the other siNA molecule, such that the 5′-end of the one of the sense siNA strands annealed to their corresponding antisense sense strand that are tethered to each other at one end, faces the 3′-end of the other sense strand (see FIG. 22 (G-H)). In one embodiment, the linkage between the 5′-end of the first antisense strand and the 3′-end of the second antisense strand is designed in such a way as to be readily cleavable (e.g., biodegradable linker) such that the 5′end of each antisense strand of the multifunctional siNA has a free 5′-end suitable to mediate RNA interefence-based cleavage of the target RNA. The tethers or linkers can be nucleotide-based linkers or non-nucleotide based linkers as generally known in the art and as described herein.

[0385] In one embodiment, the invention features a multifunctional siNA, wherein the multifunctional siNA is assembled from two separate double-stranded siNAs, with the 5′-end of one antisense strand of the siNA is tethered to the 5′-end of the antisense strand of the other siNA molecule, such that the 3′-end of the one of the sense siNA strands annealed to their corresponding antisense sense strand that are tethered to each other at one end, faces the 3′-end of the other sense strand (see FIG. 22 (E)). In one embodiment, the linkage between the 5′-end of the first antisense strand and the 5′-end of the second antisense strand is designed in such a way as to be readily cleavable (e.g., biodegradable linker) such that the 5′end of each antisense strand of the multifunctional siNA has a free 5′-end suitable to mediate RNA interefence-based cleavage of the target RNA. The tethers or linkers can be nucleotide-based linkers or non-nucleotide based linkers as generally known in the art and as described herein.

[0386] In one embodiment, the invention features a multifunctional siNA, wherein the multifunctional siNA is assembled from two separate double-stranded siNAs, with the 3′-end of one antisense strand of the siNA is tethered to the 3′-end of the antisense strand of the other siNA molecule, such that the 5′-end of the one of the sense siNA strands annealed to their corresponding antisense sense strand that are tethered to each other at one end, faces the 3′-end of the other sense strand (see FIG. 22 (F)). In one embodiment, the linkage between the 5′-end of the first antisense strand and the 5′-end of the second antisense strand is designed in such a way as to be readily cleavable (e.g., biodegradable linker) such that the 5′end of each antisense strand of the multifunctional siNA has a free 5′-end suitable to mediate RNA interefence-based cleavage of the target RNA. The tethers or linkers can be nucleotide-based linkers or non-nucleotide based linkers as generally known in the art and as described herein.

[0387] In any of the above embodiments, a first target nucleic acid sequence or second target nucleic acid sequence can independently comprise repeat expansion (RE) RNA, DNA or a portion thereof. In one embodiment, the first target nucleic acid sequence is a repeat expansion (RE) RNA, DNA or a portion thereof and the second target nucleic acid sequence is a repeat expansion (RE) RNA, DNA of a portion thereof. In one embodiment, the first target nucleic acid sequence is a repeat expansion (RE) RNA, DNA or a portion thereof and the second target nucleic acid sequence is a another RNA, DNA of a portion thereof.

Synthesis of Nucleic Acid Molecules

[0388] Synthesis of nucleic acids greater than 100 nucleotides in length is difficult using automated methods, and the therapeutic cost of such molecules is prohibitive. In this invention, small nucleic acid motifs (“small” refers to nucleic acid motifs no more than 100 nucleotides in length, preferably no more than 80 nucleotides in length, and most preferably no more than 50 nucleotides in length; e.g., individual siNA oligonucleotide sequences or siNA sequences synthesized in tandem) are preferably used for exogenous delivery. The simple structure of these molecules increases the ability of the nucleic acid to invade targeted regions of protein and/or RNA structure. Exemplary molecules of the instant invention are chemically synthesized, and others can similarly be synthesized.

[0389] Oligonucleotides (e.g., certain modified oligonucleotides or portions of oligonucleotides lacking ribonucleotides) are synthesized using protocols known in the art, for example as described in Caruthers et al., 1992, Methods in Enzymology 211, 3-19, Thompson et al., International PCT Publication No. WO 99/54459, Wincott et al., 1995, Nucleic Acids Res. 23, 2677-2684, Wincott et al., 1997, Methods Mol. Bio., 74, 59, Brennan et al., 1998, Biotechnol Bioeng., 61, 33-45, and Brennan, U.S. Pat. No. 6,001,311. All of these references are incorporated herein by reference. The synthesis of oligonucleotides makes use of common nucleic acid protecting and coupling groups, such as dimethoxytrityl at the 5′-end, and phosphoramidites at the 3′-end. In a non-limiting example, small scale syntheses are conducted on a 394 Applied Biosystems, Inc. synthesizer using a 0.2 μmol scale protocol with a 2.5 min coupling step for 2′-O-methylated nucleotides and a 45 second coupling step for 2′-deoxy nucleotides or 2′-deoxy-2′-fluoro nucleotides. Table V outlines the amounts and the contact times of the reagents used in the synthesis cycle. Alternatively, syntheses at the 0.2 μmol scale can be performed on a 96-well plate synthesizer, such as the instrument produced by Protogene (Palo Alto, Calif.) with minimal modification to the cycle. A 33-fold excess (60 μL of 0.11 M=6.6 μmol) of 2′-O-methyl phosphoramidite and a 105-fold excess of S-ethyl tetrazole (60 μL of 0.25 M=15 μmol) can be used in each coupling cycle of 2′-O-methyl residues relative to polymer-bound 5′-hydroxyl. A 22-fold excess (40 μL of 0.11 M=4.4 μmol) of deoxy phosphoramidite and a 70-fold excess of S-ethyl tetrazole (40 μL of 0.25 M=10 μmol) can be used in each coupling cycle of deoxy residues relative to polymer-bound 5′-hydroxyl. Average coupling yields on the 394 Applied Biosystems, Inc. synthesizer, determined by colorimetric quantitation of the trityl fractions, are typically 97.5-99%. Other oligonucleotide synthesis reagents for the 394 Applied Biosystems, Inc. synthesizer include the following: detritylation solution is 3% TCA in methylene chloride (ABI); capping is performed with 16% N-methyl imidazole in THF (ABI) and 10% acetic anhydride/10% 2,6-lutidine in THF (ABI); and oxidation solution is 16.9 mM 12, 49 mM pyridine, 9% water in THF (PerSeptive Biosystems, Inc.). Burdick & Jackson Synthesis Grade acetonitrile is used directly from the reagent bottle. S-Ethyltetrazole solution (0.25 M in acetonitrile) is made up from the solid obtained from American International Chemical, Inc. Alternately, for the introduction of phosphorothioate linkages, Beaucage reagent (3H-1,2-Benzodithiol-3-one 1,1-dioxide, 0.05 M in acetonitrile) is used.

[0390] Deprotection of the DNA-based oligonucleotides is performed as follows: the polymer-bound trityl-on oligoribonucleotide is transferred to a 4 mL glass screw top vial and suspended in a solution of 40% aqueous methylamine (1 mL) at 65° C. for 10 minutes. After cooling to −20° C., the supernatant is removed from the polymer support. The support is washed three times with 1.0 mL of EtOH:MeCN:H2O/3:1:1, vortexed and the supernatant is then added to the first supernatant. The combined supernatants, containing the oligoribonucleotide, are dried to a white powder.

[0391] The method of synthesis used for RNA including certain siNA molecules of the invention follows the procedure as described in Usman et al., 1987, J. Am. Chem. Soc., 109, 7845; Scaringe et al., 1990, Nucleic Acids Res., 18, 5433; and Wincott et al., 1995, Nucleic Acids Res. 23, 2677-2684 Wincott et al., 1997, Methods Mol. Bio., 74, 59, and makes use of common nucleic acid protecting and coupling groups, such as dimethoxytrityl at the 5′-end, and phosphoramidites at the 3′-end. In a non-limiting example, small scale syntheses are conducted on a 394 Applied Biosystems, Inc. synthesizer using a 0.2 μmol scale protocol with a 7.5 min coupling step for alkylsilyl protected nucleotides and a 2.5 min coupling step for 2′-O-methylated nucleotides. Table V outlines the amounts and the contact times of the reagents used in the synthesis cycle. Alternatively, syntheses at the 0.2 μmol scale can be done on a 96-well plate synthesizer, such as the instrument produced by Protogene (Palo Alto, Calif.) with minimal modification to the cycle. A 33-fold excess (60 μL of 0.11 M=6.6 μmol) of 2′-O-methyl phosphoramidite and a 75-fold excess of S-ethyl tetrazole (60 μL of 0.25 M=15 μmol) can be used in each coupling cycle of 2′-O-methyl residues relative to polymer-bound 5′-hydroxyl. A 66-fold excess (120 μL of 0.11 M=13.2 μmol) of alkylsilyl (ribo) protected phosphoramidite and a 150-fold excess of S-ethyl tetrazole (120 μL of 0.25 M=30 μmol) can be used in each coupling cycle of ribo residues relative to polymer-bound 5′-hydroxyl. Average coupling yields on the 394 Applied Biosystems, Inc. synthesizer, determined by colorimetric quantitation of the trityl fractions, are typically 97.5-99%. Other oligonucleotide synthesis reagents for the 394 Applied Biosystems, Inc. synthesizer include the following: detritylation solution is 3% TCA in methylene chloride (ABI); capping is performed with 16% N-methyl imidazole in THF (ABI) and 10% acetic anhydride/10% 2,6-lutidine in THF (ABI); oxidation solution is 16.9 mM I₂, 49 mM pyridine, 9% water in THF (PerSeptive Biosystems, Inc.). Burdick & Jackson Synthesis Grade acetonitrile is used directly from the reagent bottle. S-Ethyltetrazole solution (0.25 M in acetonitrile) is made up from the solid obtained from American International Chemical, Inc. Alternately, for the introduction of phosphorothioate linkages, Beaucage reagent (3H-1,2-Benzodithiol-3-one 1,1-dioxide 0.05 M in acetonitrile) is used.

[0392] Deprotection of the RNA is performed using either a two-pot or one-pot protocol. For the two-pot protocol, the polymer-bound trityl-on oligoribonucleotide is transferred to a 4 mL glass screw top vial and suspended in a solution of 40% aq. methylamine (1 mL) at 65° C. for 10 min. After cooling to −20° C., the supernatant is removed from the polymer support. The support is washed three times with 1.0 mL of EtOH:MeCN:H₂O/3:1:1, vortexed and the supernatant is then added to the first supernatant. The combined supernatants, containing the oligoribonucleotide, are dried to a white powder. The base deprotected oligoribonucleotide is resuspended in anhydrous TEA/HF/NMP solution (300 μL of a solution of 1.5 mL N-methylpyrrolidinone, 750 μL TEA and 1 mL TEA.3HF to provide a 1.4 M HF concentration) and heated to 65° C. After 1.5 h, the oligomer is quenched with 1.5 M NH₄HCO₃.

[0393] Alternatively, for the one-pot protocol, the polymer-bound trityl-on oligoribonucleotide is transferred to a 4 mL glass screw top vial and suspended in a solution of 33% ethanolic methylamine/DMSO: 1/1 (0.8 mL) at 65° C. for 15 minutes. The vial is brought to room temperature TEA.3HF (0.1 mL) is added and the vial is heated at 65° C. for 15 minutes. The sample is cooled at −20° C. and then quenched with 1.5 M NH₄HCO₃.

[0394] For purification of the trityl-on oligomers, the quenched NH₄HCO₃ solution is loaded onto a C-18 containing cartridge that had been prewashed with acetonitrile followed by 50 mM TEAA. After washing the loaded cartridge with water, the RNA is detritylated with 0.5% TFA for 13 minutes. The cartridge is then washed again with water, salt exchanged with 1 M NaCl and washed with water again. The oligonucleotide is then eluted with 30% acetonitrile.

[0395] The average stepwise coupling yields are typically >98% (Wincott et al., 1995 Nucleic Acids Res. 23, 2677-2684). Those of ordinary skill in the art will recognize that the scale of synthesis can be adapted to be larger or smaller than the example described above including but not limited to 96-well format.

[0396] Alternatively, the nucleic acid molecules of the present invention can be synthesized separately and joined together post-synthetically, for example, by ligation (Moore et al., 1992, Science 256, 9923; Draper et al., International PCT publication No. WO 93/23569; Shabarova et al., 1991, Nucleic Acids Research 19, 4247; Bellon et al., 1997, Nucleosides & Nucleotides, 16, 951; Bellon et al., 1997, Bioconjugate Chem. 8, 204), or by hybridization following synthesis and/or deprotection.

[0397] The siNA molecules of the invention can also be synthesized via a tandem synthesis methodology as described in Example 1 herein, wherein both siNA strands are synthesized as a single contiguous oligonucleotide fragment or strand separated by a cleavable linker which is subsequently cleaved to provide separate siNA fragments or strands that hybridize and permit purification of the siNA duplex. The linker can be a polynucleotide linker or a non-nucleotide linker. The tandem synthesis of siNA as described herein can be readily adapted to both multiwell/multiplate synthesis platforms such as 96 well or similarly larger multi-well platforms. The tandem synthesis of siNA as described herein can also be readily adapted to large scale synthesis platforms employing batch reactors, synthesis columns and the like.

[0398] A siNA molecule can also be assembled from two distinct nucleic acid strands or fragments wherein one fragment includes the sense region and the second fragment includes the antisense region of the RNA molecule.

[0399] The nucleic acid molecules of the present invention can be modified extensively to enhance stability by modification with nuclease resistant groups, for example, 2′-amino, 2′-C-allyl, 2′-fluoro, 2′-O-methyl, 2′-H (for a review see Usman and Cedergren, 1992, TIBS 17, 34; Usman et al., 1994, Nucleic Acids Symp. Ser. 31, 163). siNA constructs can be purified by gel electrophoresis using general methods or can be purified by high pressure liquid chromatography (HPLC; see Wincott et al., supra, the totality of which is hereby incorporated herein by reference) and re-suspended in water.

[0400] In another aspect of the invention, siNA molecules of the invention are expressed from transcription units inserted into DNA or RNA vectors. The recombinant vectors can be DNA plasmids or viral vectors. siNA expressing viral vectors can be constructed based on, but not limited to, adeno-associated virus, retrovirus, adenovirus, or alphavirus. The recombinant vectors capable of expressing the siNA molecules can be delivered as described herein, and persist in target cells. Alternatively, viral vectors can be used that provide for transient expression of siNA molecules.

Optimizing Activity of the Nucleic Acid Molecule of the Invention.

[0401] Chemically synthesizing nucleic acid molecules with modifications (base, sugar and/or phosphate) can prevent their degradation by serum ribonucleases, which can increase their potency (see e.g., Eckstein et al., International Publication No. WO 92/07065; Perrault et al., 1990 Nature 344, 565; Pieken et al., 1991, Science 253, 314; Usman and Cedergren, 1992, Trends in Biochem. Sci. 17, 334; Usman et al., International Publication No. WO 93/15187; and Rossi et al., International Publication No. WO 91/03162; Sproat, U.S. Pat. No. 5,334,711; Gold et al., U.S. Pat. No. 6,300,074; and Burgin et al., supra; all of which are incorporated by reference herein). All of the above references describe various chemical modifications that can be made to the base, phosphate and/or sugar moieties of the nucleic acid molecules described herein. Modifications that enhance their efficacy in cells, and removal of bases from nucleic acid molecules to shorten oligonucleotide synthesis times and reduce chemical requirements are desired.

[0402] There are several examples in the art describing sugar, base and phosphate modifications that can be introduced into nucleic acid molecules with significant enhancement in their nuclease stability and efficacy. For example, oligonucleotides are modified to enhance stability and/or enhance biological activity by modification with nuclease resistant groups, for example, 2′-amino, 2′-C-allyl, 2′-fluoro, 2′-O-methyl, 2′-O-allyl, 2′-H, nucleotide base modifications (for a review see Usman and Cedergren, 1992, TIBS. 17, 34; Usman et al., 1994, Nucleic Acids Symp. Ser. 31, 163; Burgin et al., 1996, Biochemistry, 35, 14090). Sugar modification of nucleic acid molecules have been extensively described in the art (see Eckstein et al., International Publication PCT No. WO 92/07065; Perrault et al. Nature, 1990, 344, 565-568; Pieken et al. Science, 1991, 253, 314-317; Usman and Cedergren, Trends in Biochem. Sci., 1992, 17, 334-339; Usman et al. International Publication PCT No. WO 93/15187; Sproat, U.S. Pat. No. 5,334,711 and Beigelman et al., 1995, J. Biol. Chem., 270, 25702; Beigelman et al., International PCT publication No. WO 97/26270; Beigelman et al., U.S. Pat. No. 5,716,824; Usman et al., U.S. Pat. No. 5,627,053; Woolf et al., International PCT Publication No. WO 98/13526; Thompson et al., U.S. Ser. No. 60/082,404 which was filed on Apr. 20, 1998; Karpeisky et al., 1998, Tetrahedron Lett., 39, 1131; Earnshaw and Gait, 1998, Biopolymers (Nucleic Acid Sciences), 48, 39-55; Verma and Eckstein, 1998, Annu. Rev. Biochem., 67, 99-134; and Burlina et al., 1997, Bioorg. Med. Chem., 5, 1999-2010; all of the references are hereby incorporated in their totality by reference herein). Such publications describe general methods and strategies to determine the location of incorporation of sugar, base and/or phosphate modifications and the like into nucleic acid molecules without modulating catalysis, and are incorporated by reference herein. In view of such teachings, similar modifications can be used as described herein to modify the siNA nucleic acid molecules of the instant invention so long as the ability of siNA to promote RNAi is cells is not significantly inhibited.

[0403] While chemical modification of oligonucleotide internucleotide linkages with phosphorothioate, phosphorodithioate, and/or 5′-methylphosphonate linkages improves stability, excessive modifications can cause some toxicity or decreased activity. Therefore, when designing nucleic acid molecules, the amount of these internucleotide linkages should be minimized. The reduction in the concentration of these linkages should lower toxicity, resulting in increased efficacy and higher specificity of these molecules.

[0404] Short interfering nucleic acid (siNA) molecules having chemical modifications that maintain or enhance activity are provided. Such a nucleic acid is also generally more resistant to nucleases than an unmodified nucleic acid. Accordingly, the in vitro and/or in vivo activity should not be significantly lowered. In cases in which modulation is the goal, therapeutic nucleic acid molecules delivered exogenously should optimally be stable within cells until translation of the target RNA has been modulated long enough to reduce the levels of the undesirable protein. This period of time varies between hours to days depending upon the disease state. Improvements in the chemical synthesis of RNA and DNA (Wincott et al., 1995, Nucleic Acids Res. 23, 2677; Caruthers et al., 1992, Methods in Enzymology 211, 3-19 (incorporated by reference herein)) have expanded the ability to modify nucleic acid molecules by introducing nucleotide modifications to enhance their nuclease stability, as described above.

[0405] In one embodiment, nucleic acid molecules of the invention include one or more (e.g., about 1, 2, 3, 4, 5, 6, 7, 8, 9, 10, or more) G-clamp nucleotides. A G-clamp nucleotide is a modified cytosine analog wherein the modifications confer the ability to hydrogen bond both Watson-Crick and Hoogsteen faces of a complementary guanine within a duplex, see for example Lin and Matteucci, 1998, J. Am. Chem. Soc., 120, 8531-8532. A single G-clamp analog substitution within an oligonucleotide can result in substantially enhanced helical thermal stability and mismatch discrimination when hybridized to complementary oligonucleotides. The inclusion of such nucleotides in nucleic acid molecules of the invention results in both enhanced affinity and specificity to nucleic acid targets, complementary sequences, or template strands. In another embodiment, nucleic acid molecules of the invention include one or more (e.g., about 1, 2, 3, 4, 5, 6, 7, 8, 9, 10, or more) LNA “locked nucleic acid” nucleotides such as a 2′,4′-C methylene bicyclo nucleotide (see for example Wengel et al., International PCT Publication No. WO 00/66604 and WO 99/14226).

[0406] In another embodiment, the invention features conjugates and/or complexes of siNA molecules of the invention. Such conjugates and/or complexes can be used to facilitate delivery of siNA molecules into a biological system, such as a cell. The conjugates and complexes provided by the instant invention can impart therapeutic activity by transferring therapeutic compounds across cellular membranes, altering the pharmacokinetics, and/or modulating the localization of nucleic acid molecules of the invention. The present invention encompasses the design and synthesis of novel conjugates and complexes for the delivery of molecules, including, but not limited to, small molecules, lipids, cholesterol, phospholipids, nucleosides, nucleotides, nucleic acids, antibodies, toxins, negatively charged polymers and other polymers, for example proteins, peptides, hormones, carbohydrates, polyethylene glycols, or polyamines, across cellular membranes. In general, the transporters described are designed to be used either individually or as part of a multi-component system, with or without degradable linkers. These compounds are expected to improve delivery and/or localization of nucleic acid molecules of the invention into a number of cell types originating from different tissues, in the presence or absence of serum (see Sullenger and Cech, U.S. Pat. No. 5,854,038). Conjugates of the molecules described herein can be attached to biologically active molecules via linkers that are biodegradable, such as biodegradable nucleic acid linker molecules.

[0407] The term “biodegradable linker” as used herein, refers to a nucleic acid or non-nucleic acid linker molecule that is designed as a biodegradable linker to connect one molecule to another molecule, for example, a biologically active molecule to a siNA molecule of the invention or the sense and antisense strands of a siNA molecule of the invention. The biodegradable linker is designed such that its stability can be modulated for a particular purpose, such as delivery to a particular tissue or cell type. The stability of a nucleic acid-based biodegradable linker molecule can be modulated by using various chemistries, for example combinations of ribonucleotides, deoxyribonucleotides, and chemically-modified nucleotides, such as 2′-O-methyl, 2′-fluoro, 2′-amino, 2′-O-amino, 2′-C-allyl, 2′-O-allyl, and other 2′-modified or base modified nucleotides. The biodegradable nucleic acid linker molecule can be a dimer, trimer, tetramer or longer nucleic acid molecule, for example, an oligonucleotide of about 2, 3, 4, 5, 6, 7, 8, 9, 10, 11, 12, 13, 14, 15, 16, 17, 18, 19, or 20 nucleotides in length, or can comprise a single nucleotide with a phosphorus-based linkage, for example, a phosphoramidate or phosphodiester linkage. The biodegradable nucleic acid linker molecule can also comprise nucleic acid backbone, nucleic acid sugar, or nucleic acid base modifications.

[0408] The term “biodegradable” as used herein, refers to degradation in a biological system, for example, enzymatic degradation or chemical degradation.

[0409] The term “biologically active molecule” as used herein refers to compounds or molecules that are capable of eliciting or modifying a biological response in a system. Non-limiting examples of biologically active siNA molecules either alone or in combination with other molecules contemplated by the instant invention include therapeutically active molecules such as antibodies, cholesterol, hormones, antivirals, peptides, proteins, chemotherapeutics, small molecules, vitamins, co-factors, nucleosides, nucleotides, oligonucleotides, enzymatic nucleic acids, antisense nucleic acids, triplex forming oligonucleotides, 2,5-A chimeras, siNA, dsRNA, allozymes, aptamers, decoys and analogs thereof. Biologically active molecules of the invention also include molecules capable of modulating the pharmacokinetics and/or pharmacodynamics of other biologically active molecules, for example, lipids and polymers such as polyamines, polyamides, polyethylene glycol and other polyethers.

[0410] The term “phospholipid” as used herein, refers to a hydrophobic molecule comprising at least one phosphorus group. For example, a phospholipid can comprise a phosphorus-containing group and saturated or unsaturated alkyl group, optionally substituted with OH, COOH, oxo, amine, or substituted or unsubstituted aryl groups.

[0411] Therapeutic nucleic acid molecules (e.g., siNA molecules) delivered exogenously optimally are stable within cells until reverse transcription of the RNA has been modulated long enough to reduce the levels of the RNA transcript. The nucleic acid molecules are resistant to nucleases in order to function as effective intracellular therapeutic agents. Improvements in the chemical synthesis of nucleic acid molecules described in the instant invention and in the art have expanded the ability to modify nucleic acid molecules by introducing nucleotide modifications to enhance their nuclease stability as described above.

[0412] In yet another embodiment, siNA molecules having chemical modifications that maintain or enhance enzymatic activity of proteins involved in RNAi are provided. Such nucleic acids are also generally more resistant to nucleases than unmodified nucleic acids. Thus, in vitro and/or in vivo the activity should not be significantly lowered.

[0413] Use of the nucleic acid-based molecules of the invention will lead to better treatments by affording the possibility of combination therapies (e.g., multiple siNA molecules targeted to different genes; nucleic acid molecules coupled with known small molecule modulators; or intermittent treatment with combinations of molecules, including different motifs and/or other chemical or biological molecules). The treatment of subjects with siNA molecules can also include combinations of different types of nucleic acid molecules, such as enzymatic nucleic acid molecules (ribozymes), allozymes, antisense, 2,5-A oligoadenylate, decoys, and aptamers.

[0414] In another aspect a siNA molecule of the invention comprises one or more 5′ and/or a 3′-cap structure, for example, on only the sense siNA strand, the antisense siNA strand, or both siNA strands.

[0415] By “cap structure” is meant chemical modifications, which have been incorporated at either terminus of the oligonucleotide (see, for example, Adamic et al., U.S. Pat. No. 5,998,203, incorporated by reference herein). These terminal modifications protect the nucleic acid molecule from exonuclease degradation, and may help in delivery and/or localization within a cell. The cap may be present at the 5′-terminus (5′-cap) or at the 3′-terminal (3′-cap) or may be present on both termini. In non-limiting examples, the 5′-cap includes, but is not limited to, glyceryl, inverted deoxy abasic residue (moiety); 4′,5′-methylene nucleotide; 1-(beta-D-erythrofuranosyl) nucleotide, 4′-thio nucleotide; carbocyclic nucleotide; 1,5-anhydrohexitol nucleotide; L-nucleotides; alpha-nucleotides; modified base nucleotide; phosphorodithioate linkage; threo-pentofuranosyl nucleotide; acyclic 3′,4′-seco nucleotide; acyclic 3,4-dihydroxybutyl nucleotide; acyclic 3,5-dihydroxypentyl nucleotide, 3′-3′-inverted nucleotide moiety; 3′-3′-inverted abasic moiety; 3′-2′-inverted nucleotide moiety; 3′-2′-inverted abasic moiety; 1,4-butanediol phosphate; 3′-phosphoramidate; hexylphosphate; aminohexyl phosphate; 3′-phosphate; 3′-phosphorothioate; phosphorodithioate; or bridging or non-bridging methylphosphonate moiety. Non-limiting examples of cap moieties are shown in FIG. 10.

[0416] Non-limiting examples of the 3′-cap include, but are not limited to, glyceryl, inverted deoxy abasic residue (moiety), 4′,5′-methylene nucleotide; 1-(beta-D-erythrofuranosyl) nucleotide; 4′-thio nucleotide, carbocyclic nucleotide; 5′-amino-alkyl phosphate; 1,3-diamino-2-propyl phosphate; 3-aminopropyl phosphate; 6-aminohexyl phosphate; 1,2-aminododecyl phosphate; hydroxypropyl phosphate; 1,5-anhydrohexitol nucleotide; L-nucleotide; alpha-nucleotide; modified base nucleotide; phosphorodithioate; threo-pentofuranosyl nucleotide; acyclic 3′,4′-seco nucleotide; 3,4-dihydroxybutyl nucleotide; 3,5-dihydroxypentyl nucleotide, 5′-5′-inverted nucleotide moiety; 5′-5′-inverted abasic moiety; 5′-phosphoramidate; 5′-phosphorothioate; 1,4-butanediol phosphate; 5′-amino; bridging and/or non-bridging 5′-phosphoramidate, phosphorothioate and/or phosphorodithioate, bridging or non bridging methylphosphonate and 5′-mercapto moieties (for more details see Beaucage and Iyer, 1993, Tetrahedron 49, 1925; incorporated by reference herein).

[0417] By the term “non-nucleotide” is meant any group or compound which can be incorporated into a nucleic acid chain in the place of one or more nucleotide units, including either sugar and/or phosphate substitutions, and allows the remaining bases to exhibit their enzymatic activity. The group or compound is abasic in that it does not contain a commonly recognized nucleotide base, such as adenosine, guanine, cytosine, uracil or thymine and therefore lacks a base at the 1′-position.

[0418] An “alkyl” group refers to a saturated aliphatic hydrocarbon, including straight-chain, branched-chain, and cyclic alkyl groups. Preferably, the alkyl group has 1 to 12 carbons. More preferably, it is a lower alkyl of from 1 to 7 carbons, more preferably 1 to 4 carbons. The alkyl group can be substituted or unsubstituted. When substituted the substituted group(s) is preferably, hydroxyl, cyano, alkoxy, ═O, ═S, NO₂ or N(CH₃)₂, amino, or SH. The term also includes alkenyl groups that are unsaturated hydrocarbon groups containing at least one carbon-carbon double bond, including straight-chain, branched-chain, and cyclic groups. Preferably, the alkenyl group has 1 to 12 carbons. More preferably, it is a lower alkenyl of from 1 to 7 carbons, more preferably 1 to 4 carbons. The alkenyl group may be substituted or unsubstituted. When substituted the substituted group(s) is preferably, hydroxyl, cyano, alkoxy, ═O, ═S, NO₂, halogen, N(CH₃)₂, amino, or SH. The term “alkyl” also includes alkynyl groups that have an unsaturated hydrocarbon group containing at least one carbon-carbon triple bond, including straight-chain, branched-chain, and cyclic groups. Preferably, the alkynyl group has 1 to 12 carbons. More preferably, it is a lower alkynyl of from 1 to 7 carbons, more preferably 1 to 4 carbons. The alkynyl group may be substituted or unsubstituted. When substituted the substituted group(s) is preferably, hydroxyl, cyano, alkoxy, ═O, ═S, NO₂ or N(CH₃)₂, amino or SH.

[0419] Such alkyl groups can also include aryl, alkylaryl, carbocyclic aryl, heterocyclic aryl, amide and ester groups. An “aryl” group refers to an aromatic group that has at least one ring having a conjugated pi electron system and includes carbocyclic aryl, heterocyclic aryl and biaryl groups, all of which may be optionally substituted. The preferred substituent(s) of aryl groups are halogen, trihalomethyl, hydroxyl, SH, OH, cyano, alkoxy, alkyl, alkenyl, alkynyl, and amino groups. An “alkylaryl” group refers to an alkyl group (as described above) covalently joined to an aryl group (as described above). Carbocyclic aryl groups are groups wherein the ring atoms on the aromatic ring are all carbon atoms. The carbon atoms are optionally substituted. Heterocyclic aryl groups are groups having from 1 to 3 heteroatoms as ring atoms in the aromatic ring and the remainder of the ring atoms are carbon atoms. Suitable heteroatoms include oxygen, sulfur, and nitrogen, and include furanyl, thienyl, pyridyl, pyrrolyl, N-lower alkyl pyrrolo, pyrimidyl, pyrazinyl, imidazolyl and the like, all optionally substituted. An “amide” refers to an —C(O)—NH—R, where R is either alkyl, aryl, alkylaryl or hydrogen. An “ester” refers to an —C(O)—OR′, where R is either alkyl, aryl, alkylaryl or hydrogen.

[0420] By “nucleotide” as used herein is as recognized in the art to include natural bases (standard), and modified bases well known in the art. Such bases are generally located at the 1′ position of a nucleotide sugar moiety. Nucleotides generally comprise a base, sugar and a phosphate group. The nucleotides can be unmodified or modified at the sugar, phosphate and/or base moiety, (also referred to interchangeably as nucleotide analogs, modified nucleotides, non-natural nucleotides, non-standard nucleotides and other; see, for example, Usman and McSwiggen, supra; Eckstein et al., International PCT Publication No. WO 92/07065; Usman et al., International PCT Publication No. WO 93/15187; Uhlman & Peyman, supra, all are hereby incorporated by reference herein). There are several examples of modified nucleic acid bases known in the art as summarized by Limbach et al., 1994, Nucleic Acids Res. 22, 2183. Some of the non-limiting examples of base modifications that can be introduced into nucleic acid molecules include, inosine, purine, pyridin-4-one, pyridin-2-one, phenyl, pseudouracil, 2, 4, 6-trimethoxy benzene, 3-methyl uracil, dihydrouridine, naphthyl, aminophenyl, 5-alkylcytidines (e.g., 5-methylcytidine), 5-alkyluridines (e.g., ribothymidine), 5-halouridine (e.g., 5-bromouridine) or 6-azapyrimidines or 6-alkylpyrimidines (e.g. 6-methyluridine), propyne, and others (Burgin et al., 1996, Biochemistry, 35, 14090; Uhlman & Peyman, supra). By “modified bases” in this aspect is meant nucleotide bases other than adenine, guanine, cytosine and uracil at 1′ position or their equivalents.

[0421] In one embodiment, the invention features modified siNA molecules, with phosphate backbone modifications comprising one or more phosphorothioate, phosphorodithioate, methylphosphonate, phosphotriester, morpholino, amidate carbamate, carboxymethyl, acetamidate, polyamide, sulfonate, sulfonamide, sulfamate, formacetal, thioformacetal, and/or alkylsilyl, substitutions. For a review of oligonucleotide backbone modifications, see Hunziker and Leumann, 1995, Nucleic Acid Analogues. Synthesis and Properties, in Modern Synthetic Methods, VCH, 331-417, and Mesmaeker et al., 1994, Novel Backbone Replacements for Oligonucleotides, in Carbohydrate Modifications in Antisense Research, ACS, 24-39.

[0422] By “abasic” is meant sugar moieties lacking a base or having other chemical groups in place of a base at the 1′ position, see for example Adamic et al., U.S. Pat. No. 5,998,203.

[0423] By “unmodified nucleoside” is meant one of the bases adenine, cytosine, guanine, thymine, or uracil joined to the 1′ carbon of β-D-ribo-furanose.

[0424] By “modified nucleoside” is meant any nucleotide base which contains a modification in the chemical structure of an unmodified nucleotide base, sugar and/or phosphate. Non-limiting examples of modified nucleotides are shown by Formulae I-VII and/or other modifications described herein.

[0425] In connection with 2′-modified nucleotides as described for the present invention, by “amino” is meant 2′-NH₂ or 2′-O—NH₂, which can be modified or unmodified. Such modified groups are described, for example, in Eckstein et al., U.S. Pat. No. 5,672,695 and Matulic-Adamic et al., U.S. Pat. No. 6,248,878, which are both incorporated by reference in their entireties.

[0426] Various modifications to nucleic acid siNA structure can be made to enhance the utility of these molecules. Such modifications will enhance shelf-life, half-life in vitro, stability, and ease of introduction of such oligonucleotides to the target site, e.g., to enhance penetration of cellular membranes, and confer the ability to recognize and bind to targeted cells.

Administration of Nucleic Acid Molecules

[0427] A siNA molecule of the invention can be adapted for use to treat, for example, Huntinton disease and related conditions such as progressive chorea, rigidity, dementia, and seizures, spinocerebellar ataxia, spinal and bulbar muscular dystrophy (SBMA), dentatorubropallidoluysian atrophy (DRPLA) and any other diseases or conditions that are related to or will respond to the levels of a repeat expansion (repeat expansion (RE)) gene in a cell or tissue, alone or in combination with other therapies. For example, a siNA molecule can comprise a delivery vehicle, including liposomes, for administration to a subject, carriers and diluents and their salts, and/or can be present in pharmaceutically acceptable formulations. Methods for the delivery of nucleic acid molecules are described in Akhtar et al., 1992, Trends Cell Bio., 2, 139; Delivery Strategies for Antisense Oligonucleotide Therapeutics, ed. Akhtar, 1995, Maurer et al., 1999, Mol. Membr. Biol., 16, 129-140; Hofland and Huang, 1999, Handb. Exp. Pharmacol., 137, 165-192; and Lee et al., 2000, ACS Symp. Ser., 752, 184-192, all of which are incorporated herein by reference. Beigelman et al., U.S. Pat. No. 6,395,713 and Sullivan et al., PCT WO 94/02595 further describe the general methods for delivery of nucleic acid molecules. These protocols can be utilized for the delivery of virtually any nucleic acid molecule. Nucleic acid molecules can be administered to cells by a variety of methods known to those of skill in the art, including, but not restricted to, encapsulation in liposomes, by iontophoresis, or by incorporation into other vehicles, such as biodegradable polymers, hydrogels, cyclodextrins (see for example Gonzalez et al., 1999, Bioconjugate Chem., 10, 1068-1074; Wang et al., International PCT publication Nos. WO 03/47518 and WO 03/46185), poly(lactic-co-glycolic)acid (PLGA) and PLCA microspheres (see for example U.S. Pat. No. 6,447,796 and U.S. Patent Application Publication No. U.S. 2002130430), biodegradable nanocapsules, and bioadhesive microspheres, or by proteinaceous vectors (O'Hare and Normand, International PCT Publication No. WO 00/53722). In another embodiment, the nucleic acid molecules of the invention can also be formulated or complexed with polyethyleneimine and derivatives thereof, such as polyethyleneimine-polyethyleneglycol-N-acetylgalactosamine (PEI-PEG-GAL) or polyethyleneimine-polyethyleneglycol-tri-N-acetylgalactosamine (PEI-PEG-triGAL) derivatives. Alternatively, the nucleic acid/vehicle combination is locally delivered by direct injection or by use of an infusion pump. Many examples in the art describe CNS delivery methods of oligonucleotides by osmotic pump, (see Chun et al., 1998, Neuroscience Letters, 257, 135-138, D'Aldin et al., 1998, Mol. Brain Research, 55, 151-164, Dryden et al., 1998, J. Endocrinol., 157, 169-175, Ghirnikar et al., 1998, Neuroscience Letters, 247, 21-24) or direct infusion (Broaddus et al., 1997, Neurosurg. Focus, 3, article 4). Various devices as are known in the art can be utilized to deliver nucleic acid molecules of the invention (see for example Turner, 2003, Acta Neurochir Suppl., 87, 29-35). Other routes of delivery include, but are not limited to oral (tablet or pill form) and/or intrathecal delivery (Gold, 1997, Neuroscience, 76, 1153-1158). For a comprehensive review on drug delivery strategies including broad coverage of CNS delivery, see Ho et al., 1999, Curr. Opin. Mol. Ther., 1, 336-343 and Jain, Drug Delivery Systems: Technologies and Commercial Opportunities, Decision Resources, 1998 and Groothuis et al., 1997, J. NeuroVirol., 3, 387-400. Direct injection of the nucleic acid molecules of the invention, whether subcutaneous, intramuscular, or intradermal, can take place using standard needle and syringe methodologies, or by needle-free technologies such as those described in Conry et al., 1999, Clin. Cancer Res., 5, 2330-2337 and Barry et al., International PCT Publication No. WO 99/31262. The molecules of the instant invention can be used as pharmaceutical agents. Pharmaceutical agents prevent, modulate the occurrence, or treat (alleviate a symptom to some extent, preferably all of the symptoms) of a disease state in a subject.

[0428] In one embodiment, a siNA molecule of the invention is administered to a subject or organism via local administration to relevant tissues or cells, such as brain cells and tissues (e.g., basal ganglia, striatum, or cortex), for example, by administration of siNA, vectors or expression cassettes of the invention to relevant cells (e.g., basal ganglia, striatum, cortex, cerebellum, motor neurons etc.). In one embodiment, the siNA, vector, or expression cassette is administered to the subject or organism by stereotactic or convection enhanced delivery to the brain. For example, U.S. Pat. No. 5,720,720 provides methods and devices useful for stereotactic and convection enhanced delivery of reagents to the brain. Such methods and devices can be readily used for the delivery of siNAs, vectors, or expression cassettes of the invention to a subject or organism, and is incorporated by reference herein in its entirety. U.S. Patent Application Nos. 2002/0141980; 2002/0114780; and 2002/0187127 all provide methods and devices useful for stereotactic and convection enhanced delivery of reagents that can be readily adapted for delivery of siNAs, vectors, or expression cassettes of the invention to a subject or organism, and are incorporated by reference herein in their entirety. Particular devices that may be useful in delivering siNAs, vectors, or expression cassettes of the invention to a subject or organism are for example described in U.S. Patent Application No. 2004/0162255, which is incorporated by reference herein in its entirety. The siNA molecule of the invention can be chemically synthesized or expressed from vectors as described herein or otherwise known in the art to target appropriate tissues or cells in the subject or organism.

[0429] Experiments have demonstrated the efficient in vivo uptake of nucleic acids by neurons. As an example of local administration of nucleic acids to nerve cells, Sommer et al., 1998, Antisense Nuc. Acid Drug Dev., 8, 75, describe a study in which a 15mer phosphorothioate antisense nucleic acid molecule to c-fos is administered to rats via microinjection into the brain. Antisense molecules labeled with tetramethylrhodamine-isothiocyanate (TRITC) or fluorescein isothiocyanate (FITC) were taken up by exclusively by neurons thirty minutes post-injection. A diffuse cytoplasmic staining and nuclear staining was observed in these cells. As an example of systemic administration of nucleic acid to nerve cells, Epa et al., 2000, Antisense Nuc. Acid Drug Dev., 10, 469, describe an in vivo mouse study in which beta-cyclodextrin-adamantane-oligonucleotide conjugates were used to target the p75 neurotrophin receptor in neuronally differentiated PC12 cells. Following a two week course of IP administration, pronounced uptake of p75 neurotrophin receptor antisense was observed in dorsal root ganglion (DRG) cells. In addition, a marked and consistent down-regulation of p75 was observed in DRG neurons. Additional approaches to the targeting of nucleic acid to neurons are described in Broaddus et al., 1998, J. Neurosurg., 88(4), 734; Karle et al., 1997, Eur. J. Pharmocol., 340(2/3), 153; Bannai et al., 1998, Brain Research, 784(1,2), 304; Rajakumar et al., 1997, Synapse, 26(3), 199; Wu-pong et al., 1999, BioPharm, 12(1), 32; Bannai et al., 1998, Brain Res. Protoc., 3(1), 83; Simantov et al., 1996, Neuroscience, 74(1), 39. Nucleic acid molecules of the invention are therefore amenable to delivery to and uptake by cells that express repeat expansion allelic variants for modulation of repeat expansion (RE) gene expression.

[0430] The delivery of nucleic acid molecules of the invention, targeting repeat expansion (RE) is provided by a variety of different strategies. Traditional approaches to CNS delivery that can be used include, but are not limited to, intrathecal and intracerebroventricular administration, implantation of catheters and pumps, direct injection or perfusion at the site of injury or lesion, injection into the brain arterial system, or by chemical or osmotic opening of the blood-brain barrier. Other approaches can include the use of various transport and carrier systems, for example though the use of conjugates and biodegradable polymers. Furthermore, gene therapy approaches, for example as described in Kaplitt et al., U.S. Pat. No. 6,180,613 and Davidson, WO 04/013280, can be used to express nucleic acid molecules in the CNS.

[0431] In one embodiment, a siNA composition of the invention can comprise a delivery vehicle, including liposomes, for administration to a subject, carriers and diluents and their salts, and/or can be present in pharmaceutically acceptable formulations. Methods for the delivery of nucleic acid molecules are described in Akhtar et al., 1992, Trends Cell Bio., 2, 139; Delivery Strategies for Antisense Oligonucleotide Therapeutics, ed. Akhtar, 1995, Maurer et al., 1999, Mol. Membr. Biol., 16, 129-140; Hofland and Huang, 1999, Handb. Exp. Pharmacol., 137, 165-192; and Lee et al., 2000, ACS Symp. Ser., 752, 184-192, all of which are incorporated herein by reference. Beigelman et al., U.S. Pat. No. 6,395,713 and Sullivan et al., PCT WO 94/02595 further describe the general methods for delivery of nucleic acid molecules. These protocols can be utilized for the delivery of virtually any nucleic acid molecule. Nucleic acid molecules can be administered to cells by a variety of methods known to those of skill in the art, including, but not restricted to, encapsulation in liposomes, by iontophoresis, or by incorporation into other vehicles, such as biodegradable polymers, hydrogels, cyclodextrins (see for example Gonzalez et al., 1999, Bioconjugate Chem., 10, 1068-1074; Wang et al., International PCT publication Nos. WO 03/47518 and WO 03/46185), poly(lactic-co-glycolic)acid (PLGA) and PLCA microspheres (see for example U.S. Pat. No. 6,447,796 and U.S. Patent Application Publication No. U.S. 2002130430), biodegradable nanocapsules, and bioadhesive microspheres, or by proteinaceous vectors (O'Hare and Normand, International PCT Publication No. WO 00/53722). In another embodiment, the nucleic acid molecules of the invention can also be formulated or complexed with polyethyleneimine and derivatives thereof, such as polyethyleneimine-polyethyleneglycol-N-acetylgalactosamine (PEI-PEG-GAL) or polyethyleneimine-polyethyleneglycol-tri-N-acetylgalactosamine (PEI-PEG-triGAL) derivatives. In one embodiment, the nucleic acid molecules of the invention are formulated as described in U.S. Patent Application Publication No. 20030077829, incorporated by reference herein in its entirety.

[0432] In one embodiment, a siNA molecule of the invention is complexed with membrane disruptive agents such as those described in U.S. Patent Application Publication No. 20010007666, incorporated by reference herein in its entirety including the drawings. In another embodiment, the membrane disruptive agent or agents and the siNA molecule are also complexed with a cationic lipid or helper lipid molecule, such as those lipids described in U.S. Pat. No. 6,235,310, incorporated by reference herein in its entirety including the drawings.

[0433] In one embodiment, a siNA molecule of the invention is complexed with delivery systems as described in U.S. Patent Application Publication No. 2003077829 and International PCT Publication Nos. WO 00/03683 and WO 02/087541, all incorporated by reference herein in their entirety including the drawings.

[0434] In one embodiment, delivery systems of the invention include, for example, aqueous and nonaqueous gels, creams, multiple emulsions, microemulsions, liposomes, ointments, aqueous and nonaqueous solutions, lotions, aerosols, hydrocarbon bases and powders, and can contain excipients such as solubilizers, permeation enhancers (e.g., fatty acids, fatty acid esters, fatty alcohols and amino acids), and hydrophilic polymers (e.g., polycarbophil and polyvinylpyrolidone). In one embodiment, the pharmaceutically acceptable carrier is a liposome or a transdermal enhancer. Examples of liposomes which can be used in this invention include the following: (1) CellFectin, 1:1.5 (M/M) liposome formulation of the cationic lipid N,NI,NII,NIII-tetramethyl-N,NI,NII,NIII-tetrapalmit-y-spermine and dioleoyl phosphatidylethanolamine (DOPE) (GIBCO BRL); (2) Cytofectin GSV, 2:1 (M/M) liposome formulation of a cationic lipid and DOPE (Glen Research); (3) DOTAP (N-[1-(2,3-dioleoyloxy)-N,N,N-tri-methyl-ammoniummethylsulfate) (Boehringer Manheim); and (4) Lipofectamine, 3:1 (M/M) liposome formulation of the polycationic lipid DOSPA and the neutral lipid DOPE (GIBCO BRL).

[0435] In one embodiment, delivery systems of the invention include patches, tablets, suppositories, pessaries, gels and creams, and can contain excipients such as solubilizers and enhancers (e.g., propylene glycol, bile salts and amino acids), and other vehicles (e.g., polyethylene glycol, fatty acid esters and derivatives, and hydrophilic polymers such as hydroxypropylmethylcellulose and hyaluronic acid).

[0436] In one embodiment, a siNA molecule of the invention is administered iontophoretically, for example to the dermis or to other relevant tissues such as the inner ear/cochlea. Non-limiting examples of iontophoretic delivery are described in, for example, WO 03/043689 and WO 03/030989, which are incorporated by reference in their entireties herein.

[0437] In one embodiment, siNA molecules of the invention are formulated or complexed with polyethylenimine (e.g., linear or branched PEI) and/or polyethylenimine derivatives, including for example grafted PEIs such as galactose PEI, cholesterol PEI, antibody derivatized PEI, and polyethylene glycol PEI (PEG-PEI) derivatives thereof (see for example Ogris et al., 2001, AAPA PharmSci, 3, 1-11; Furgeson et al., 2003, Bioconjugate Chem., 14, 840-847; Kunath et al., 2002, Phramaceutical Research, 19, 810-817; Choi et al., 2001, Bull. Korean Chem. Soc., 22, 46-52; Bettinger et al., 1999, Bioconjugate Chem., 10, 558-561; Peterson et al., 2002, Bioconjugate Chem., 13, 845-854; Erbacher et al., 1999, Journal of Gene Medicine Preprint, 1, 1-18; Godbey et al., 1999, PNAS USA, 96, 5177-5181; Godbey et al., 1999, Journal of Controlled Release, 60, 149-160; Diebold et al., 1999, Journal of Biological Chemistry, 274, 19087-19094; Thomas and Klibanov, 2002, PNAS USA, 99, 14640-14645; and Sagara, U.S. Pat. No. 6,586,524, incorporated by reference herein.

[0438] In one embodiment, a siNA molecule of the invention comprises a bioconjugate, for example a nucleic acid conjugate as described in Vargeese et al., U.S. Ser. No. 10/427,160, filed Apr. 30, 2003; U.S. Pat. No. 6,528,631; U.S. Pat. No. 6,335,434; U.S. Pat. No. 6,235,886; U.S. Pat. No. 6,153,737; U.S. Pat. No. 5,214,136; U.S. Pat. No. 5,138,045, all incorporated by reference herein.

[0439] Thus, the invention features a pharmaceutical composition comprising one or more nucleic acid(s) of the invention in an acceptable carrier, such as a stabilizer, buffer, and the like. The polynucleotides of the invention can be administered (e.g., RNA, DNA or protein) and introduced to a subject by any standard means, with or without stabilizers, buffers, and the like, to form a pharmaceutical composition. When it is desired to use a liposome delivery mechanism, standard protocols for formation of liposomes can be followed. The compositions of the present invention can also be formulated and used as creams, gels, sprays, oils and other suitable compositions for topical, dermal, or transdermal administration as is known in the art.

[0440] The present invention also includes pharmaceutically acceptable formulations of the compounds described. These formulations include salts of the above compounds, e.g., acid addition salts, for example, salts of hydrochloric, hydrobromic, acetic acid, and benzene sulfonic acid.

[0441] A pharmacological composition or formulation refers to a composition or formulation in a form suitable for administration, e.g., systemic or local administration, into a cell or subject, including for example a human. Suitable forms, in part, depend upon the use or the route of entry, for example oral, transdermal, or by injection. Such forms should not prevent the composition or formulation from reaching a target cell (i.e., a cell to which the negatively charged nucleic acid is desirable for delivery). For example, pharmacological compositions injected into the blood stream should be soluble. Other factors are known in the art, and include considerations such as toxicity and forms that prevent the composition or formulation from exerting its effect.

[0442] In one embodiment, siNA molecules of the invention are administered to a subject by systemic administration in a pharmaceutically acceptable composition or formulation. By “systemic administration” is meant in vivo systemic absorption or accumulation of drugs in the blood stream followed by distribution throughout the entire body. Administration routes that lead to systemic absorption include, without limitation: intravenous, subcutaneous, portal vein, intraperitoneal, inhalation, oral, intrapulmonary and intramuscular. Each of these administration routes exposes the siNA molecules of the invention to an accessible diseased tissue. The rate of entry of a drug into the circulation has been shown to be a function of molecular weight or size. The use of a liposome or other drug carrier comprising the compounds of the instant invention can potentially localize the drug, for example, in certain tissue types, such as the tissues of the reticular endothelial system (RES). A liposome formulation that can facilitate the association of drug with the surface of cells, such as, lymphocytes and macrophages is also useful. This approach can provide enhanced delivery of the drug to target cells by taking advantage of the specificity of macrophage and lymphocyte immune recognition of abnormal cells.

[0443] By “pharmaceutically acceptable formulation” or “pharmaceutically acceptable composition” is meant, a composition or formulation that allows for the effective distribution of the nucleic acid molecules of the instant invention in the physical location most suitable for their desired activity. Non-limiting examples of agents suitable for formulation with the nucleic acid molecules of the instant invention include: P-glycoprotein inhibitors (such as Pluronic P85); biodegradable polymers, such as poly (DL-lactide-coglycolide) microspheres for sustained release delivery (Emerich, D F et al, 1999, Cell Transplant, 8, 47-58); and loaded nanoparticles, such as those made of polybutylcyanoacrylate. Other non-limiting examples of delivery strategies for the nucleic acid molecules of the instant invention include material described in Boado et al., 1998, J. Pharm. Sci., 87, 1308-1315; Tyler et al., 1999, FEBS Lett., 421, 280-284; Pardridge et al., 1995, PNAS USA., 92, 5592-5596; Boado, 1995, Adv. Drug Delivery Rev., 15, 73-107; Aldrian-Herrada et al., 1998, Nucleic Acids Res., 26, 4910-4916; and Tyler et al., 1999, PNAS USA., 96, 7053-7058.

[0444] The invention also features the use of a composition comprising surface-modified liposomes containing poly (ethylene glycol) lipids (PEG-modified, or long-circulating liposomes or stealth liposomes) and nucleic acid molecules of the invention. These formulations offer a method for increasing the accumulation of drugs (e.g., siNA) in target tissues. This class of drug carriers resists opsonization and elimination by the mononuclear phagocytic system (MPS or RES), thereby enabling longer blood circulation times and enhanced tissue exposure for the encapsulated drug (Lasic et al. Chem. Rev. 1995, 95, 2601-2627; Ishiwata et al., Chem. Pharm. Bull. 1995, 43, 1005-1011). Such liposomes have been shown to accumulate selectively in tumors, presumably by extravasation and capture in the neovascularized target tissues (Lasic et al., Science 1995, 267, 1275-1276; Oku et al., 1995, Biochim. Biophys. Acta, 1238, 86-90). The long-circulating liposomes enhance the pharmacokinetics and pharmacodynamics of DNA and RNA, particularly compared to conventional cationic liposomes which are known to accumulate in tissues of the MPS (Liu et al., J. Biol. Chem. 1995, 42, 24864-24870; Choi et al., International PCT Publication No. WO 96/10391; Ansell et al., International PCT Publication No. WO 96/10390; Holland et al., International PCT Publication No. WO 96/10392). Long-circulating liposomes are also likely to protect drugs from nuclease degradation to a greater extent compared to cationic liposomes, based on their ability to avoid accumulation in metabolically aggressive MPS tissues such as the liver and spleen.

[0445] The present invention also includes compositions prepared for storage or administration that include a pharmaceutically effective amount of the desired compounds in a pharmaceutically acceptable carrier or diluent. Acceptable carriers or diluents for therapeutic use are well known in the pharmaceutical art, and are described, for example, in Remington's Pharmaceutical Sciences, Mack Publishing Co. (A. R. Gennaro edit. 1985), hereby incorporated by reference herein. For example, preservatives, stabilizers, dyes and flavoring agents can be provided. These include sodium benzoate, sorbic acid and esters of p-hydroxybenzoic acid. In addition, antioxidants and suspending agents can be used.

[0446] A pharmaceutically effective dose is that dose required to prevent, inhibit the occurrence, or treat (alleviate a symptom to some extent, preferably all of the symptoms) of a disease state. The pharmaceutically effective dose depends on the type of disease, the composition used, the route of administration, the type of mammal being treated, the physical characteristics of the specific mammal under consideration, concurrent medication, and other factors that those skilled in the medical arts will recognize. Generally, an amount between 0.1 mg/kg and 100 mg/kg body weight/day of active ingredients is administered dependent upon potency of the negatively charged polymer.

[0447] The nucleic acid molecules of the invention and formulations thereof can be administered orally, topically, parenterally, by inhalation or spray, or rectally in dosage unit formulations containing conventional non-toxic pharmaceutically acceptable carriers, adjuvants and/or vehicles. The term parenteral as used herein includes percutaneous, subcutaneous, intravascular (e.g., intravenous), intramuscular, or intrathecal injection or infusion techniques and the like. In addition, there is provided a pharmaceutical formulation comprising a nucleic acid molecule of the invention and a pharmaceutically acceptable carrier. One or more nucleic acid molecules of the invention can be present in association with one or more non-toxic pharmaceutically acceptable carriers and/or diluents and/or adjuvants, and if desired other active ingredients. The pharmaceutical compositions containing nucleic acid molecules of the invention can be in a form suitable for oral use, for example, as tablets, troches, lozenges, aqueous or oily suspensions, dispersible powders or granules, emulsion, hard or soft capsules, or syrups or elixirs.

[0448] Compositions intended for oral use can be prepared according to any method known to the art for the manufacture of pharmaceutical compositions and such compositions can contain one or more such sweetening agents, flavoring agents, coloring agents or preservative agents in order to provide pharmaceutically elegant and palatable preparations. Tablets contain the active ingredient in admixture with non-toxic pharmaceutically acceptable excipients that are suitable for the manufacture of tablets. These excipients can be, for example, inert diluents; such as calcium carbonate, sodium carbonate, lactose, calcium phosphate or sodium phosphate; granulating and disintegrating agents, for example, corn starch, or alginic acid; binding agents, for example starch, gelatin or acacia; and lubricating agents, for example magnesium stearate, stearic acid or talc. The tablets can be uncoated or they can be coated by known techniques. In some cases such coatings can be prepared by known techniques to delay disintegration and absorption in the gastrointestinal tract and thereby provide a sustained action over a longer period. For example, a time delay material such as glyceryl monosterate or glyceryl distearate can be employed.

[0449] Formulations for oral use can also be presented as hard gelatin capsules wherein the active ingredient is mixed with an inert solid diluent, for example, calcium carbonate, calcium phosphate or kaolin, or as soft gelatin capsules wherein the active ingredient is mixed with water or an oil medium, for example peanut oil, liquid paraffin or olive oil.

[0450] Aqueous suspensions contain the active materials in a mixture with excipients suitable for the manufacture of aqueous suspensions. Such excipients are suspending agents, for example sodium carboxymethylcellulose, methylcellulose, hydropropyl-methylcellulose, sodium alginate, polyvinylpyrrolidone, gum tragacanth and gum acacia; dispersing or wetting agents can be a naturally-occurring phosphatide, for example, lecithin, or condensation products of an alkylene oxide with fatty acids, for example polyoxyethylene stearate, or condensation products of ethylene oxide with long chain aliphatic alcohols, for example heptadecaethyleneoxycetanol, or condensation products of ethylene oxide with partial esters derived from fatty acids and a hexitol such as polyoxyethylene sorbitol monooleate, or condensation products of ethylene oxide with partial esters derived from fatty acids and hexitol anhydrides, for example polyethylene sorbitan monooleate. The aqueous suspensions can also contain one or more preservatives, for example ethyl, or n-propyl p-hydroxybenzoate, one or more coloring agents, one or more flavoring agents, and one or more sweetening agents, such as sucrose or saccharin.

[0451] Oily suspensions can be formulated by suspending the active ingredients in a vegetable oil, for example arachis oil, olive oil, sesame oil or coconut oil, or in a mineral oil such as liquid paraffin. The oily suspensions can contain a thickening agent, for example beeswax, hard paraffin or cetyl alcohol. Sweetening agents and flavoring agents can be added to provide palatable oral preparations. These compositions can be preserved by the addition of an anti-oxidant such as ascorbic acid

[0452] Dispersible powders and granules suitable for preparation of an aqueous suspension by the addition of water provide the active ingredient in admixture with a dispersing or wetting agent, suspending agent and one or more preservatives. Suitable dispersing or wetting agents or suspending agents are exemplified by those already mentioned above. Additional excipients, for example sweetening, flavoring and coloring agents, can also be present.

[0453] Pharmaceutical compositions of the invention can also be in the form of oil-in-water emulsions. The oily phase can be a vegetable oil or a mineral oil or mixtures of these. Suitable emulsifying agents can be naturally-occurring gums, for example gum acacia or gum tragacanth, naturally-occurring phosphatides, for example soy bean, lecithin, and esters or partial esters derived from fatty acids and hexitol, anhydrides, for example sorbitan monooleate, and condensation products of the said partial esters with ethylene oxide, for example polyoxyethylene sorbitan monooleate. The emulsions can also contain sweetening and flavoring agents.

[0454] Syrups and elixirs can be formulated with sweetening agents, for example glycerol, propylene glycol, sorbitol, glucose or sucrose. Such formulations can also contain a demulcent, a preservative and flavoring and coloring agents. The pharmaceutical compositions can be in the form of a sterile injectable aqueous or oleaginous suspension. This suspension can be formulated according to the known art using those suitable dispersing or wetting agents and suspending agents that have been mentioned above. The sterile injectable preparation can also be a sterile injectable solution or suspension in a non-toxic parentally acceptable diluent or solvent, for example as a solution in 1,3-butanediol. Among the acceptable vehicles and solvents that can be employed are water, Ringer's solution and isotonic sodium chloride solution. In addition, sterile, fixed oils are conventionally employed as a solvent or suspending medium. For this purpose, any bland fixed oil can be employed including synthetic mono-or diglycerides. In addition, fatty acids such as oleic acid find use in the preparation of injectables.

[0455] The nucleic acid molecules of the invention can also be administered in the form of suppositories, e.g., for rectal administration of the drug. These compositions can be prepared by mixing the drug with a suitable non-irritating excipient that is solid at ordinary temperatures but liquid at the rectal temperature and will therefore melt in the rectum to release the drug. Such materials include cocoa butter and polyethylene glycols.

[0456] Nucleic acid molecules of the invention can be administered parenterally in a sterile medium. The drug, depending on the vehicle and concentration used, can either be suspended or dissolved in the vehicle. Advantageously, adjuvants such as local anesthetics, preservatives and buffering agents can be dissolved in the vehicle.

[0457] Dosage levels of the order of from about 0.1 mg to about 140 mg per kilogram of body weight per day are useful in the treatment of the above-indicated conditions (about 0.5 mg to about 7 g per subject per day). The amount of active ingredient that can be combined with the carrier materials to produce a single dosage form varies depending upon the host treated and the particular mode of administration. Dosage unit forms generally contain between from about 1 mg to about 500 mg of an active ingredient.

[0458] It is understood that the specific dose level for any particular subject depends upon a variety of factors including the activity of the specific compound employed, the age, body weight, general health, sex, diet, time of administration, route of administration, and rate of excretion, drug combination and the severity of the particular disease undergoing therapy.

[0459] For administration to non-human animals, the composition can also be added to the animal feed or drinking water. It can be convenient to formulate the animal feed and drinking water compositions so that the animal takes in a therapeutically appropriate quantity of the composition along with its diet. It can also be convenient to present the composition as a premix for addition to the feed or drinking water.

[0460] The nucleic acid molecules of the present invention can also be administered to a subject in combination with other therapeutic compounds to increase the overall therapeutic effect. The use of multiple compounds to treat an indication can increase the beneficial effects while reducing the presence of side effects.

[0461] In one embodiment, the invention comprises compositions suitable for administering nucleic acid molecules of the invention to specific cell types. For example, the asialoglycoprotein receptor (ASGPr) (Wu and Wu, 1987, J. Biol. Chem. 262, 4429-4432) is unique to hepatocytes and binds branched galactose-terminal glycoproteins, such as asialoorosomucoid (ASOR). In another example, the folate receptor is overexpressed in many cancer cells. Binding of such glycoproteins, synthetic glycoconjugates, or folates to the receptor takes place with an affinity that strongly depends on the degree of branching of the oligosaccharide chain, for example, triatennary structures are bound with greater affinity than biatenarry or monoatennary chains (Baenziger and Fiete, 1980, Cell, 22, 611-620; Connolly et al., 1982, J. Biol. Chem., 257, 939-945). Lee and Lee, 1987, Glycoconjugate J., 4, 317-328, obtained this high specificity through the use of N-acetyl-D-galactosamine as the carbohydrate moiety, which has higher affinity for the receptor, compared to galactose. This “clustering effect” has also been described for the binding and uptake of mannosyl-terminating glycoproteins or glycoconjugates (Ponpipom et al., 1981, J. Med. Chem., 24, 1388-1395). The use of galactose, galactosamine, or folate based conjugates to transport exogenous compounds across cell membranes can provide a targeted delivery approach to, for example, the treatment of liver disease, cancers of the liver, or other cancers. The use of bioconjugates can also provide a reduction in the required dose of therapeutic compounds required for treatment. Furthermore, therapeutic bioavailability, pharmacodynamics, and pharmacokinetic parameters can be modulated through the use of nucleic acid bioconjugates of the invention. Non-limiting examples of such bioconjugates are described in Vargeese et al., U.S. Ser. No. 10/201,394, filed Aug. 13, 2001; and Matulic-Adamic et al., U.S. Ser. No. 60/362,016, filed Mar. 6, 2002.

[0462] Alternatively, certain siNA molecules of the instant invention can be expressed within cells from eukaryotic promoters (e.g., Izant and Weintraub, 1985, Science, 229, 345; McGarry and Lindquist, 1986, Proc. Natl. Acad. Sci., USA 83, 399; Scanlon et al., 1991, Proc. Natl. Acad. Sci. USA, 88, 10591-5; Kashani-Sabet et al., 1992, Antisense Res. Dev., 2, 3-15; Dropulic et al., 1992, J. Virol., 66, 1432-41; Weerasinghe et al., 1991, J. Virol., 65, 5531-4; Ojwang et al., 1992, Proc. Natl. Acad. Sci. USA, 89, 10802-6; Chen et al., 1992, Nucleic Acids Res., 20, 4581-9; Sarver et al., 1990 Science, 247, 1222-1225; Thompson et al., 1995, Nucleic Acids Res., 23, 2259; Good et al., 1997, Gene Therapy, 4, 45. Those skilled in the art realize that any nucleic acid can be expressed in eukaryotic cells from the appropriate DNA/RNA vector. The activity of such nucleic acids can be augmented by their release from the primary transcript by a enzymatic nucleic acid (Draper et al., PCT WO 93/23569, and Sullivan et al., PCT WO 94/02595; Ohkawa et al., 1992, Nucleic Acids Symp. Ser., 27, 15-6; Taira et al., 1991, Nucleic Acids Res., 19, 5125-30; Ventura et al., 1993, Nucleic Acids Res., 21, 3249-55; Chowrira et al., 1994, J. Biol. Chem., 269, 25856.

[0463] In another aspect of the invention, RNA molecules of the present invention can be expressed from transcription units (see for example Couture et al., 1996, TIG., 12, 510) inserted into DNA or RNA vectors. The recombinant vectors can be DNA plasmids or viral vectors. siNA expressing viral vectors can be constructed based on, but not limited to, adeno-associated virus, retrovirus, adenovirus, or alphavirus. In another embodiment, pol III based constructs are used to express nucleic acid molecules of the invention (see for example Thompson, U.S. Pats. Nos. 5,902,880 and 6,146,886). The recombinant vectors capable of expressing the siNA molecules can be delivered as described above, and persist in target cells. Alternatively, viral vectors can be used that provide for transient expression of nucleic acid molecules. Such vectors can be repeatedly administered as necessary. Once expressed, the siNA molecule interacts with the target mRNA and generates an RNAi response. Delivery of siNA molecule expressing vectors can be systemic, such as by intravenous or intramuscular administration, by administration to target cells ex-planted from a subject followed by reintroduction into the subject, or by any other means that would allow for introduction into the desired target cell (for a review see Couture et al., 1996, TIG., 12, 510).

[0464] In one aspect the invention features an expression vector comprising a nucleic acid sequence encoding at least one siNA molecule of the instant invention. The expression vector can encode one or both strands of a siNA duplex, or a single self-complementary strand that self hybridizes into a siNA duplex. The nucleic acid sequences encoding the siNA molecules of the instant invention can be operably linked in a manner that allows expression of the siNA molecule (see for example Paul et al., 2002, Nature Biotechnology, 19, 505; Miyagishi and Taira, 2002, Nature Biotechnology, 19, 497; Lee et al., 2002, Nature Biotechnology, 19, 500; and Novina et al., 2002, Nature Medicine, advance online publication doi: 10.1038/nm725).

[0465] In another aspect, the invention features an expression vector comprising: a) a transcription initiation region (e.g., eukaryotic pol I, II or III initiation region); b) a transcription termination region (e.g., eukaryotic pol I, II or III termination region); and c) a nucleic acid sequence encoding at least one of the siNA molecules of the instant invention, wherein said sequence is operably linked to said initiation region and said termination region in a manner that allows expression and/or delivery of the siNA molecule. The vector can optionally include an open reading frame (ORF) for a protein operably linked on the 5′ side or the 3′-side of the sequence encoding the siNA of the invention; and/or an intron (intervening sequences).

[0466] Transcription of the siNA molecule sequences can be driven from a promoter for eukaryotic RNA polymerase I (pol I), RNA polymerase II (pol II), or RNA polymerase III (pol III). Transcripts from pol II or pol III promoters are expressed at high levels in all cells; the levels of a given pol II promoter in a given cell type depends on the nature of the gene regulatory sequences (enhancers, silencers, etc.) present nearby. Prokaryotic RNA polymerase promoters are also used, providing that the prokaryotic RNA polymerase enzyme is expressed in the appropriate cells (Elroy-Stein and Moss, 1990, Proc. Natl. Acad. Sci. USA, 87, 6743-7; Gao and Huang 1993, Nucleic Acids Res., 21, 2867-72; Lieber et al., 1993, Methods Enzymol., 217, 47-66; Zhou et al., 1990, Mol. Cell. Biol., 10, 4529-37). Several investigators have demonstrated that nucleic acid molecules expressed from such promoters can function in mammalian cells (e.g. Kashani-Sabet et al., 1992, Antisense Res. Dev., 2, 3-15; Ojwang et al., 1992, Proc. Natl. Acad. Sci. USA, 89, 10802-6; Chen et al., 1992, Nucleic Acids Res., 20, 4581-9; Yu et al., 1993, Proc. Natl. Acad. Sci. USA, 90, 6340-4; L'Huillier et al., 1992, EMBO J., 11, 4411-8; Lisziewicz et al., 1993, Proc. Natl. Acad. Sci. U.S. A, 90, 8000-4; Thompson et al., 1995, Nucleic Acids Res., 23, 2259; Sullenger & Cech, 1993, Science, 262, 1566). More specifically, transcription units such as the ones derived from genes encoding U6 small nuclear (snRNA), transfer RNA (tRNA) and adenovirus VA RNA are useful in generating high concentrations of desired RNA molecules such as siNA in cells (Thompson et al., supra; Couture and Stinchcomb, 1996, supra; Noonberg et al., 1994, Nucleic Acid Res., 22, 2830; Noonberg et al., U.S. Pat. No. 5,624,803; Good et al., 1997, Gene Ther., 4, 45; Beigelman et al., International PCT Publication No. WO 96/18736. The above siNA transcription units can be incorporated into a variety of vectors for introduction into mammalian cells, including but not restricted to, plasmid DNA vectors, viral DNA vectors (such as adenovirus or adeno-associated virus vectors), or viral RNA vectors (such as retroviral or alphavirus vectors) (for a review see Couture and Stinchcomb, 1996, supra).

[0467] In another aspect the invention features an expression vector comprising a nucleic acid sequence encoding at least one of the siNA molecules of the invention in a manner that allows expression of that siNA molecule. The expression vector comprises in one embodiment; a) a transcription initiation region; b) a transcription termination region; and c) a nucleic acid sequence encoding at least one strand of the siNA molecule, wherein the sequence is operably linked to the initiation region and the termination region in a manner that allows expression and/or delivery of the siNA molecule.

[0468] In another embodiment the expression vector comprises: a) a transcription initiation region; b) a transcription termination region; c) an open reading frame; and d) a nucleic acid sequence encoding at least one strand of a siNA molecule, wherein the sequence is operably linked to the 3′-end of the open reading frame and wherein the sequence is operably linked to the initiation region, the open reading frame and the termination region in a manner that allows expression and/or delivery of the siNA molecule. In yet another embodiment, the expression vector comprises: a) a transcription initiation region; b) a transcription termination region; c) an intron; and d) a nucleic acid sequence encoding at least one siNA molecule, wherein the sequence is operably linked to the initiation region, the intron and the termination region in a manner which allows expression and/or delivery of the nucleic acid molecule.

[0469] In another embodiment, the expression vector comprises: a) a transcription initiation region; b) a transcription termination region; c) an intron; d) an open reading frame; and e) a nucleic acid sequence encoding at least one strand of a siNA molecule, wherein the sequence is operably linked to the 3′-end of the open reading frame and wherein the sequence is operably linked to the initiation region, the intron, the open reading frame and the termination region in a manner which allows expression and/or delivery of the siNA molecule.

Huntingtin Biology and Biochemistry

[0470] The following discussion is adapted from the Revilla et al., 2002, Huntington Disease, Copyright 2004, eMedicine.com, Inc. and the OMIM database entry for Huntington disease, Copyright® 1966-2004 Johns Hopkins University. Huntington disease (HD) is an incurable, adult-onset, autosomal dominant inherited disorder associated with cell loss within a specific subset of neurons in the basal ganglia and cortex. HD is named after George Huntington, the physician who described it as hereditary chorea in 1872. Characteristic features of HD include involuntary movements, dementia, and behavioral changes. Huntington disease (HD) is inherited as an autosomal dominant disease that gives rise to progressive, selective or localized neural cell death associated with choreic movements and dementia. The classic signs of Huntington disease are progressive chorea, rigidity, and dementia, oftem associated with seizures. A characteristic atrophy of the caudate nucleus is seen in radiographic images. The most striking neuropathology in HD occurs within the neostriatum, in which gross atrophy of the caudate nucleus and putamen is accompanied by selective neuronal loss and astrogliosis. Other regions, including the globus pallidus, thalamus, subthalamic nucleus, substantia nigra, and cerebellum, show varying degrees of atrophy depending on the pathologic grade. The extent of gross striatal pathology, neuronal loss, and gliosis provides a basis for grading the severity of HD pathology (grades 0-4). Typically, there is a prodromal phase of mild psychotic and behavioral symptoms which precedes frank Huntington chorea by up to 10 years.

[0471] The disease is associated with increases in the length of a polyglutamine or CAG triplet repeat present in the Huntingtin gene located on chromosome 4p16.3. The function of huntingtin is not known. Normally, it is located in the cytoplasm. The association of huntingtin with the cytoplasmic surface of a variety of organelles, including transport vesicles, synaptic vesicles, microtubules, and mitochondria, raises the possibility of the occurrence of normal cellular interactions that might be relevant to neurodegeneration. Although the variation in age at onset of HD is partly explained by the size of the expanded CAG repeat, it is strongly heritable, which suggests that other genes modify the age at onset.

[0472] Studies have shown that mutant huntingtin protein from human brain, transgenic animals, and cells is more resistant to proteolysis than normal huntingtin. The N-terminal cleavage fragments that arise from the processing of normal huntingtin are sequestered by full-length huntingtin. One model has been proposed in which inhibition of proteolysis of mutant huntingtin leads to aggregation and neurotoxicity through the sequestration of important targets, including normal huntingtin. The presence of neuronal intranuclear inclusions (NIs) initially led to the view that they are toxic and, hence, pathogenic. More recent data from striatal neuronal cultures transfected with mutant huntingtin and transgenic mice carrying the spinocerebellar ataxia-1 (SCA-1) gene (another CAG repeat disorder) suggest that NIIs may not be necessary or sufficient to cause neuronal cell death, but translocation into the nucleus is sufficient to cause neuronal cell death. Caspase inhibition in clonal striatal cells showed no correlation between the reduction of aggregates in the cells and increased survival.

[0473] Cytoplasmic protein extracts from several rat brain regions, including striatum and cortex (sites of neuronal degeneration in HD), contain a 63 kD RNA-binding protein that interacts specifically with CAG repeat sequences. It has been noted that the protein RNA interactions are dependent upon the length of the CAG repeat, and that longer repeats bind substantially more protein. Two CAG binding proteins have been identified in human cortex and striatum, one of 63 kD and another of 49 kD. These data suggest mechanisms by which RNA binding proteins may be involved in the pathological course of trinucleotide-associated neurologic diseases (see for example McLaughlin et al., 1996, Hum. Genet. 59, 561-569.

[0474] The Huntington's Disease Collaborative Research Group (1993, Cell, 72, 971-983) found a gene, designated IT15 (important transcript 15) and later called huntingtin, which was isolated using cloned trapped exons and which contains a polymorphic trinucleotide repeat that is expanded and unstable on HD chromosomes. A (CAG)ₙ repeat longer than the normal range was observed on HD chromosomes from all disease families examined. The families came from a variety of ethnic backgrounds and demonstrated a variety of 4p16.3 haplotypes. The (CAG)ₙ repeat appeared to be located within the coding sequence of a predicted protein of about 348 kD that is widely expressed but unrelated to any known gene. Thus, the HD mutation involves an unstable DNA segment similar to those previously observed in several disorders, including the fragile X syndrome, Kennedy syndrome, and myotonic dystrophy. The fact that the phenotype of HD is completely dominant suggests that the disorder results from a gain-of-function mutation in which either the mRNA product or the protein product of the disease allele has some new property or is expressed inappropriately (see for example, Myers et al., 1989, Am. J. Hum. Genet., 34, 481-488).

[0475] The use of small interfering nucleic acid molecules targeting HD, for example mutant alleles associated with Huntington disease, or alternately bot mutant and wild type HD alleles, provides a class of novel therapeutic agents that can be used in the the treatment of Huntington Disease and any other disease or condition that responds to modulation of HD genes.

### EXAMPLES

[0476] The following are non-limiting examples showing the selection, isolation, synthesis and activity of nucleic acids of the instant invention.

### Example 1

### Tandem Synthesis of siNA Constructs

[0477] Exemplary siNA molecules of the invention are synthesized in tandem using a cleavable linker, for example, a succinyl-based linker. Tandem synthesis as described herein is followed by a one-step purification process that provides RNAi molecules in high yield. This approach is highly amenable to siNA synthesis in support of high throughput RNAi screening, and can be readily adapted to multi-column or multi-well synthesis platforms.

[0478] After completing a tandem synthesis of a siNA oligo and its complement in which the 5′-terminal dimethoxytrityl (5′-O-DMT) group remains intact (trityl on synthesis), the oligonucleotides are deprotected as described above. Following deprotection, the siNA sequence strands are allowed to spontaneously hybridize. This hybridization yields a duplex in which one strand has retained the 5′-O-DMT group while the complementary strand comprises a terminal 5′-hydroxyl. The newly formed duplex behaves as a single molecule during routine solid-phase extraction purification (Trityl-On purification) even though only one molecule has a dimethoxytrityl group. Because the strands form a stable duplex, this dimethoxytrityl group (or an equivalent group, such as other trityl groups or other hydrophobic moieties) is all that is required to purify the pair of oligos, for example, by using a C18 cartridge.

[0479] Standard phosphoramidite synthesis chemistry is used up to the point of introducing a tandem linker, such as an inverted deoxy abasic succinate or glyceryl succinate linker (see FIG. 1) or an equivalent cleavable linker. A non-limiting example of linker coupling conditions that can be used includes a hindered base such as diisopropylethylamine (DIPA) and/or DMAP in the presence of an activator reagent such as Bromotripyrrolidinophosphoniumhexaflurorophosphate (PyBrOP). After the linker is coupled, standard synthesis chemistry is utilized to complete synthesis of the second sequence leaving the terminal the 5′-O-DMT intact. Following synthesis, the resulting oligonucleotide is deprotected according to the procedures described herein and quenched with a suitable buffer, for example with 50 mM NaOAc or 1.5M NH₄H₂CO₃.

[0480] Purification of the siNA duplex can be readily accomplished using solid phase extraction, for example, using a Waters C18 SepPak 1 g cartridge conditioned with 1 column volume (CV) of acetonitrile, 2 CV H₂O, and 2 CV 50 mM NaOAc. The sample is loaded and then washed with 1 CV H₂O or 50 mM NaOAc. Failure sequences are eluted with 1 CV 14% ACN (Aqueous with 50 mM NaOAc and 50 mM NaCl). The column is then washed, for example with 1 CV H₂O followed by on-column detritylation, for example by passing 1 CV of 1% aqueous trifluoroacetic acid (TFA) over the column, then adding a second CV of 1% aqueous TFA to the column and allowing to stand for approximately 10 minutes. The remaining TFA solution is removed and the column washed with H₂O followed by 1 CV 1M NaCl and additional H₂O. The siNA duplex product is then eluted, for example, using 1 CV 20% aqueous CAN.

[0481] FIG. 2 provides an example of MALDI-TOF mass spectrometry analysis of a purified siNA construct in which each peak corresponds to the calculated mass of an individual siNA strand of the siNA duplex. The same purified siNA provides three peaks when analyzed by capillary gel electrophoresis (CGE), one peak presumably corresponding to the duplex siNA, and two peaks presumably corresponding to the separate siNA sequence strands. Ion exchange HPLC analysis of the same siNA contract only shows a single peak. Testing of the purified siNA construct using a luciferase reporter assay described below demonstrated the same RNAi activity compared to siNA constructs generated from separately synthesized oligonucleotide sequence strands.

### Example 2

### Identification of Potential siNA Target Sites in any RNA Sequence

[0482] The sequence of an RNA target of interest, such as a viral or human mRNA transcript, is screened for target sites, for example by using a computer folding algorithm. In a non-limiting example, the sequence of a gene or RNA gene transcript derived from a database, such as Genbank, is used to generate siNA targets having complementarity to the target. Such sequences can be obtained from a database, or can be determined experimentally as known in the art. Target sites that are known, for example, those target sites determined to be effective target sites based on studies with other nucleic acid molecules, for example ribozymes or antisense, or those targets known to be associated with a disease, trait, or condition such as those sites containing mutations or deletions, can be used to design siNA molecules targeting those sites. Various parameters can be used to determine which sites are the most suitable target sites within the target RNA sequence. These parameters include but are not limited to secondary or tertiary RNA structure, the nucleotide base composition of the target sequence, the degree of homology between various regions of the target sequence, or the relative position of the target sequence within the RNA transcript. Based on these determinations, any number of target sites within the RNA transcript can be chosen to screen siNA molecules for efficacy, for example by using in vitro RNA cleavage assays, cell culture, or animal models. In a non-limiting example, anywhere from 1 to 1000 target sites are chosen within the transcript based on the size of the siNA construct to be used. High throughput screening assays can be developed for screening siNA molecules using methods known in the art, such as with multi-well or multi-plate assays to determine efficient reduction in target gene expression.

### Example 3

### Selection of siNA Molecule Target Sites in a RNA

[0483] The following non-limiting steps can be used to carry out the selection of siNAs targeting a given gene sequence or transcript.
[0484] 1. The target sequence is parsed in silico into a list of all fragments or subsequences of a particular length, for example 23 nucleotide fragments, contained within the target sequence. This step is typically carried out using a custom Perl script, but commercial sequence analysis programs such as Oligo, MacVector, or the GCG Wisconsin Package can be employed as well.
[0485] 2. In some instances the siNAs correspond to more than one target sequence; such would be the case for example in targeting different transcripts of the same gene, targeting different transcripts of more than one gene, or for targeting both the human gene and an animal homolog. In this case, a subsequence list of a particular length is generated for each of the targets, and then the lists are compared to find matching sequences in each list. The subsequences are then ranked according to the number of target sequences that contain the given subsequence; the goal is to find subsequences that are present in most or all of the target sequences. Alternately, the ranking can identify subsequences that are unique to a target sequence, such as a mutant target sequence. Such an approach would enable the use of siNA to target specifically the mutant sequence and not effect the expression of the normal sequence.
[0486] 3. In some instances the siNA subsequences are absent in one or more sequences while present in the desired target sequence; such would be the case if the siNA targets a gene with a paralogous family member that is to remain untargeted. As in case 2 above, a subsequence list of a particular length is generated for each of the targets, and then the lists are compared to find sequences that are present in the target gene but are absent in the untargeted paralog.
[0487] 4. The ranked siNA subsequences can be further analyzed and ranked according to GC content. A preference can be given to sites containing 30-70% GC, with a further preference to sites containing 40-60% GC.
[0488] 5. The ranked siNA subsequences can be further analyzed and ranked according to self-folding and internal hairpins. Weaker internal folds are preferred; strong hairpin structures are to be avoided.
[0489] 6. The ranked siNA subsequences can be further analyzed and ranked according to whether they have runs of GGG or CCC in the sequence. GGG (or even more Gs) in either strand can make oligonucleotide synthesis problematic and can potentially interfere with RNAi activity, so it is avoided whenever better sequences are available. CCC is searched in the target strand because that will place GGG in the antisense strand.
[0490] 7. The ranked siNA subsequences can be further analyzed and ranked according to whether they have the dinucleotide UU (uridine dinucleotide) on the 3′-end of the sequence, and/or AA on the 5′-end of the sequence (to yield 3′ UU on the antisense sequence). These sequences allow one to design siNA molecules with terminal TT thymidine dinucleotides.
[0491] 8. Four or five target sites are chosen from the ranked list of subsequences as described above. For example, in subsequences having 23 nucleotides, the right 21 nucleotides of each chosen 23-mer subsequence are then designed and synthesized for the upper (sense) strand of the siNA duplex, while the reverse complement of the left 21 nucleotides of each chosen 23-mer subsequence are then designed and synthesized for the lower (antisense) strand of the siNA duplex (see Tables II and III). If terminal TT residues are desired for the sequence (as described in paragraph 7), then the two 3′ terminal nucleotides of both the sense and antisense strands are replaced by TT prior to synthesizing the oligos.
[0492] 9. The siNA molecules are screened in an in vitro, cell culture or animal model system to identify the most active siNA molecule or the most preferred target site within the target RNA sequence.
[0493] 10. Other design considerations can be used when selecting target nucleic acid sequences, see, for example, Reynolds et al., 2004, Nature Biotechnology Advanced Online Publication, 1 Feb. 2004, doi:10.1038/nbt936 and Ui-Tei et al., 2004, Nucleic Acids Research, 32, doi: 10.1093/nar/gkh247.

[0494] In an alternate approach, a pool of siNA constructs specific to a repeat expansion (RE) target sequence is used to screen for target sites in cells expressing repeat expansion (RE) RNA, such as cultured Jurkat, HeLa, A549, 293T such as COS-1 cells (see for example Sittler et al., 2001, Human Molecular Genetics, 10, 1307-1315). The general strategy used in this approach is shown in FIG. 9. A non-limiting example of such is a pool comprising sequences having any of SEQ ID NOS 1-3575. Cells expressing repeat expansion (RE) are transfected with the pool of siNA constructs and cells that demonstrate a phenotype associated with repeat expansion (RE) inhibition are sorted. The pool of siNA constructs can be expressed from transcription cassettes inserted into appropriate vectors (see for example FIG. 7 and FIG. 8). The siNA from cells demonstrating a positive phenotypic change (e.g., decreased proliferation, decreased repeat expansion (RE) mRNA levels or decreased repeat expansion (RE) protein expression), are sequenced to determine the most suitable target site(s) within the target repeat expansion (RE) RNA sequence.

### Example 4

### Repeat Expansion (RE) Targeted siNA Design

[0495] siNA target sites were chosen by analyzing sequences of the repeat expansion (RE) RNA target and optionally prioritizing the target sites on the basis of folding (structure of any given sequence analyzed to determine siNA accessibility to the target), by using a library of siNA molecules as described in Example 3, or alternately by using an in vitro siNA system as described in Example 6 herein. siNA molecules were designed that could bind each target and are optionally individually analyzed by computer folding to assess whether the siNA molecule can interact with the target sequence. Varying the length of the siNA molecules can be chosen to optimize activity. Generally, a sufficient number of complementary nucleotide bases are chosen to bind to, or otherwise interact with, the target RNA, but the degree of complementarity can be modulated to accommodate siNA duplexes or varying length or base composition. By using such methodologies, siNA molecules can be designed to target sites within any known RNA sequence, for example those RNA sequences corresponding to the any gene transcript.

[0496] Chemically modified siNA constructs are designed to provide nuclease stability for systemic administration in vivo and/or improved pharmacokinetic, localization, and delivery properties while preserving the ability to mediate RNAi activity. Chemical modifications as described herein are introduced synthetically using synthetic methods described herein and those generally known in the art. The synthetic siNA constructs are then assayed for nuclease stability in serum and/or cellular/tissue extracts (e.g. liver extracts). The synthetic siNA constructs are also tested in parallel for RNAi activity using an appropriate assay, such as a luciferase reporter assay as described herein or another suitable assay that can quantity RNAi activity. Synthetic siNA constructs that possess both nuclease stability and RNAi activity can be further modified and re-evaluated in stability and activity assays. The chemical modifications of the stabilized active siNA constructs can then be applied to any siNA sequence targeting any chosen RNA and used, for example, in target screening assays to pick lead siNA compounds for therapeutic development (see for example FIG. 11).

### Example 5

### Chemical Synthesis and Purification of siNA

[0497] siNA molecules can be designed to interact with various sites in the RNA message, for example, target sequences within the RNA sequences described herein. The sequence of one strand of the siNA molecule(s) is complementary to the target site sequences described above. The siNA molecules can be chemically synthesized using methods described herein. Inactive siNA molecules that are used as control sequences can be synthesized by scrambling the sequence of the siNA molecules such that it is not complementary to the target sequence. Generally, siNA constructs can by synthesized using solid phase oligonucleotide synthesis methods as described herein (see for example Usman et al., U.S. Pat. Nos. 5,804,683; 5,831,071; 5,998,203; 6,117,657; 6,353,098; 6,362,323; 6,437,117; 6,469,158; Scaringe et al., U.S. Pat. Nos. 6,111,086; 6,008,400; 6,111,086 all incorporated by reference herein in their entirety).

[0498] In a non-limiting example, RNA oligonucleotides are synthesized in a stepwise fashion using the phosphoramidite chemistry as is known in the art. Standard phosphoramidite chemistry involves the use of nucleosides comprising any of 5′-O-dimethoxytrityl, 2′-O-tert-butyldimethylsilyl, 3′-O-2-Cyanoethyl N,N-diisopropylphos-phoroamidite groups, and exocyclic amine protecting groups (e.g. N6-benzoyl adenosine, N4 acetyl cytidine, and N2-isobutyryl guanosine). Alternately, 2′-O-Silyl Ethers can be used in conjunction with acid-labile 2′-O-orthoester protecting groups in the synthesis of RNA as described by Scaringe supra. Differing 2′ chemistries can require different protecting groups, for example 2′-deoxy-2′-amino nucleosides can utilize N-phthaloyl protection as described by Usman et al., U.S. Pat. No. 5,631,360, incorporated by reference herein in its entirety).

[0499] During solid phase synthesis, each nucleotide is added sequentially (3′- to 5′-direction) to the solid support-bound oligonucleotide. The first nucleoside at the 3′-end of the chain is covalently attached to a solid support (e.g., controlled pore glass or polystyrene) using various linkers. The nucleotide precursor, a ribonucleoside phosphoramidite, and activator are combined resulting in the coupling of the second nucleoside phosphoramidite onto the 5′-end of the first nucleoside. The support is then washed and any unreacted 5′-hydroxyl groups are capped with a capping reagent such as acetic anhydride to yield inactive 5′-acetyl moieties. The trivalent phosphorus linkage is then oxidized to a more stable phosphate linkage. At the end of the nucleotide addition cycle, the 5′-O-protecting group is cleaved under suitable conditions (e.g., acidic conditions for trityl-based groups and Fluoride for silyl-based groups). The cycle is repeated for each subsequent nucleotide.

[0500] Modification of synthesis conditions can be used to optimize coupling efficiency, for example by using differing coupling times, differing reagent/phosphoramidite concentrations, differing contact times, differing solid supports and solid support linker chemistries depending on the particular chemical composition of the siNA to be synthesized. Deprotection and purification of the siNA can be performed as is generally described in Usman et al., U.S. Pat. No. 5,831,071, U.S. Pat. No. 6,353,098, U.S. Pat. No. 6,437,117, and Bellon et al., U.S. Pat. No. 6,054,576, U.S. Pat. No. 6,162,909, U.S. Pat. No. 6,303,773, or Scaringe supra, incorporated by reference herein in their entireties. Additionally, deprotection conditions can be modified to provide the best possible yield and purity of siNA constructs. For example, applicant has observed that oligonucleotides comprising 2′-deoxy-2′-fluoro nucleotides can degrade under inappropriate deprotection conditions. Such oligonucleotides are deprotected using aqueous methylamine at about 35° C. for 30 minutes. If the 2′-deoxy-2′-fluoro containing oligonucleotide also comprises ribonucleotides, after deprotection with aqueous methylamine at about 35° C. for 30 minutes, TEA-HF is added and the reaction maintained at about 65° C. for an additional 15 minutes.

### Example 6

### RNAi In Vitro Assay to Assess siNA Activity

[0501] An in vitro assay that recapitulates RNAi in a cell-free system is used to evaluate siNA constructs targeting repeat expansion (RE) RNA targets. The assay comprises the system described by Tuschl et al., 1999, Genes and Development, 13, 3191-3197 and Zamore et al., 2000, Cell, 101, 25-33 adapted for use with repeat expansion (RE) target RNA. A Drosophila extract derived from syncytial blastoderm is used to reconstitute RNAi activity in vitro. Target RNA is generated via in vitro transcription from an appropriate repeat expansion (RE) expressing plasmid using T7 RNA polymerase or via chemical synthesis as described herein. Sense and antisense siNA strands (for example 20 uM each) are annealed by incubation in buffer (such as 100 mM potassium acetate, 30 mM HEPES-KOH, pH 7.4, 2 mM magnesium acetate) for 1 minute at 90° C. followed by 1 hour at 37° C., then diluted in lysis buffer (for example 100 mM potassium acetate, 30 mM HEPES-KOH at pH 7.4, 2 mM magnesium acetate). Annealing can be monitored by gel electrophoresis on an agarose gel in TBE buffer and stained with ethidium bromide. The Drosophila lysate is prepared using zero to two-hour-old embryos from Oregon R flies collected on yeasted molasses agar that are dechorionated and lysed. The lysate is centrifuged and the supernatant isolated. The assay comprises a reaction mixture containing 50% lysate [vol/vol], RNA (10-50 pM final concentration), and 10% [vol/vol] lysis buffer containing siNA (10 nM final concentration). The reaction mixture also contains 10 mM creatine phosphate, 10 ug/ml creatine phosphokinase, 100 um GTP, 100 uM UTP, 100 uM CTP, 500 uM ATP, 5 mM DTT, 0.1 U/uL RNasin (Promega), and 100 uM of each amino acid. The final concentration of potassium acetate is adjusted to 100 mM. The reactions are pre-assembled on ice and preincubated at 25° C. for 10 minutes before adding RNA, then incubated at 25° C. for an additional 60 minutes. Reactions are quenched with 4 volumes of 1.25× Passive Lysis Buffer (Promega). Target RNA cleavage is assayed by RT-PCR analysis or other methods known in the art and are compared to control reactions in which siNA is omitted from the reaction.

[0502] Alternately, internally-labeled target RNA for the assay is prepared by in vitro transcription in the presence of [alpha-³²P] CTP, passed over a G50 Sephadex column by spin chromatography and used as target RNA without further purification. Optionally, target RNA is 5′-³²P-end labeled using T4 polynucleotide kinase enzyme. Assays are performed as described above and target RNA and the specific RNA cleavage products generated by RNAi are visualized on an autoradiograph of a gel. The percentage of cleavage is determined by PHOSPHOR IMAGER® (autoradiography) quantitation of bands representing intact control RNA or RNA from control reactions without siNA and the cleavage products generated by the assay.

[0503] In one embodiment, this assay is used to determine target sites in the repeat expansion (RE) RNA target for siNA mediated RNAi cleavage, wherein a plurality of siNA constructs are screened for RNAi mediated cleavage of the repeat expansion (RE) RNA target, for example, by analyzing the assay reaction by electrophoresis of labeled target RNA, or by northern blotting, as well as by other methodology well known in the art.

### Example 7

### Nucleic Acid Inhibition of Repeat Expansion (RE) Target RNA In Vivo

[0504] siNA molecules targeted to the huma repeat expansion (RE) RNA are designed and synthesized as described above. These nucleic acid molecules can be tested for cleavage activity in vivo, for example, using the following procedure. The target sequences and the nucleotide location within the repeat expansion (RE) RNA are given in Table II and III.

[0505] Two formats are used to test the efficacy of siNAs targeting repeat expansion (RE). First, the reagents are tested in cell culture using, for example, Jurkat, HeLa, A549, COS-1 or 293T cells, to determine the extent of RNA and protein inhibition. siNA reagents (e.g.; see Tables II and III) are selected against the repeat expansion (RE) target as described herein. RNA inhibition is measured after delivery of these reagents by a suitable transfection agent to, for example, Jurkat, HeLa, A549 or 293T cells. Relative amounts of target RNA are measured versus actin using real-time PCR monitoring of amplification (eg., ABI 7700 TAQMAN®). A comparison is made to a mixture of oligonucleotide sequences made to unrelated targets or to a randomized siNA control with the same overall length and chemistry, but randomly substituted at each position. Primary and secondary lead reagents are chosen for the target and optimization performed. After an optimal transfection agent concentration is chosen, a RNA time-course of inhibition is performed with the lead siNA molecule. In addition, a cell-plating format can be used to determine RNA inhibition.

Delivery of siNA to Cells

[0506] Cells (e.g., Jurkat, HeLa, A549 or 293T cells) are seeded, for example, at 1×10⁵ cells per well of a six-well dish in EGM-2 (BioWhittaker) the day before transfection. siNA (final concentration, for example 20 nM) and cationic lipid (e.g., final concentration 2 μg/ml) are complexed in EGM basal media (Biowhittaker) at 37° C. for 30 minutes in polystyrene tubes. Following vortexing, the complexed siNA is added to each well and incubated for the times indicated. For initial optimization experiments, cells are seeded, for example, at 1×10³ in 96 well plates and siNA complex added as described. Efficiency of delivery of siNA to cells is determined using a fluorescent siNA complexed with lipid. Cells in 6-well dishes are incubated with siNA for 24 hours, rinsed with PBS and fixed in 2% paraformaldehyde for 15 minutes at room temperature. Uptake of siNA is visualized using a fluorescent microscope.

TAQMAN® (Real-Time PCR Monitoring of Amplification) and Lightcycler Quantification of mRNA

[0507] Total RNA is prepared from cells following siNA delivery, for example, using Qiagen RNA purification kits for 6-well or Rneasy extraction kits for 96-well assays. For TAQMAN® analysis (real-time PCR monitoring of amplification), dual-labeled probes are synthesized with the reporter dye, FAM or JOE, covalently linked at the 5′-end and the quencher dye TAMRA conjugated to the 3′-end. One-step RT-PCR amplifications are performed on, for example, an ABI PRISM 7700 Sequence Detector using 50 μl reactions consisting of 10 μl total RNA, 100 nM forward primer, 900 nM reverse primer, 100 nM probe, 1× TaqMan PCR reaction buffer (PE-Applied Biosystems), 5.5 mM MgCl₂, 300 μM each dATP, dCTP, dGTP, and dTTP, 10U RNase Inhibitor (Promega), 1.25U AMPLITAQ GOLD® (DNA polymerase) (PE-Applied Biosystems) and 10U M-MLV Reverse Transcriptase (Promega). The thermal cycling conditions can consist of 30 minutes at 48° C., 10 minutes at 95° C., followed by 40 cycles of 15 seconds at 95° C. and 1 minute at 60° C. Quantitation of mRNA levels is determined relative to standards generated from serially diluted total cellular RNA (300, 100, 33, 11 ng/reaction) and normalizing to β-actin or GAPDH mRNA in parallel TAQMAN® reactions (real-time PCR monitoring of amplification). For each gene of interest an upper and lower primer and a fluorescently labeled probe are designed. Real time incorporation of SYBR Green I dye into a specific PCR product can be measured in glass capillary tubes using a lightcyler. A standard curve is generated for each primer pair using control cRNA. Values are represented as relative expression to GAPDH in each sample.

Western Blotting

[0508] Nuclear extracts can be prepared using a standard micro preparation technique (see for example Andrews and Faller, 1991, Nucleic Acids Research, 19, 2499). Protein extracts from supernatants are prepared, for example using TCA precipitation. An equal volume of 20% TCA is added to the cell supernatant, incubated on ice for 1 hour and pelleted by centrifugation for 5 minutes. Pellets are washed in acetone, dried and resuspended in water. Cellular protein extracts are run on a 10% Bis-Tris NuPage (nuclear extracts) or 4-12% Tris-Glycine (supernatant extracts) polyacrylamide gel and transferred onto nitro-cellulose membranes. Non-specific binding can be blocked by incubation, for example, with 5% non-fat milk for 1 hour followed by primary antibody for 16 hour at 4° C. Following washes, the secondary antibody is applied, for example (1:10,000 dilution) for 1 hour at room temperature and the signal detected with SuperSignal reagent (Pierce).

### Example 8

### Animal Models Useful to Evaluate the Down-Regulation of HD Gene Expression

[0509] Evaluating the efficacy of anti-HD agents in animal models is an important prerequisite to human clinical trials. Although the HD mRNA and protein product (huntingtin) show widespread distribution, the progressive neurodegeneration is selective in location, with regional neuron loss and gliosis in striatum, cerebral cortex, thalamus, subthalamus, and hippocampus. An experimental transgenic mouse model has utilized widespread expression of full-length human HD cDNA in mice with either 16, 48, or 89 CAG repeats. Only mice with 48 or 89 CAG repeats manifested progressive behavioral and motor dysfunction with neuron loss and gliosis in striatum, cerebral cortex, thalamus, and hippocampus (Reddy et al., 1998, Nature Genet. 20, 198-202). These animals represent a clinically relevant model for HD pathogenesis and can provide insight into the underlying pathophysiologic mechanisms of other triplet repeat disorders. Other neurodegenerative animal models as are known in the art can similarly be utilized to evaluate siNA molecules of the invention, for example models that utilize systemic or localized delivery (e.g., direct injection, intrathecal delivery, osmotic pump etc.) of therapeutic compounds to the CNS, (see for example Ryu et al., 2003, Exp Neurol., 183, 700-4). As such, this model provides an animal model for testing therapeutic drugs, including siNA constructs of the instant invention.

### Example 9

### RNAi Mediated Inhibition of Repeat Expansion (RE) Expression

In Vitro siNA Mediated Inhibition of Repeat Expansion (Re) RNA

[0510] siNA constructs (Table III) are tested for efficacy in reducing repeat expansion (RE) RNA expression in, for example, COS-1 or Hela cells. Cells are plated approximately 24 hours before transfection in 96-well plates at 5,000-7,500 cells/well, 100 μl/well, such that at the time of transfection cells are 70-90% confluent. For transfection, annealed siNAs are mixed with the transfection reagent (Lipofectamine 2000, Invitrogen) in a volume of 50 μl/well and incubated for 20 minutes at room temperature. The siNA transfection mixtures are added to cells to give a final siNA concentration of 25 nM in a volume of 150 μl. Each siNA transfection mixture is added to 3 wells for triplicate siNA treatments. Cells are incubated at 37° for 24 hours in the continued presence of the siNA transfection mixture. At 24 hours, RNA is prepared from each well of treated cells. The supernatants with the transfection mixtures are first removed and discarded, then the cells are lysed and RNA prepared from each well. Target gene expression following treatment is evaluated by RT-PCR for the target gene and for a control gene (36B4, an RNA polymerase subunit) for normalization. The triplicate data is averaged and the standard deviations determined for each treatment. Normalized data are graphed and the percent reduction of target mRNA by active siNAs in comparison to their respective inverted control siNAs is determined.

[0511] In a non-limiting example, siNA molecules targeting human huntingtin (HD) were evaluated in cell culture using the transgenic allele (HD82Q) used to make the HD model N171-82Q. A myc tag to the HD protein was utilized for western blot analysis. HEK-293 cells were transfected with HD82Q-myc construct alone or with active siNA constructs 1, 2, and 3 (Sirna Compound Nos. 31993/31994, 31995/31996, 31997/31998 respectively, Table III) or matched chemistry inverted control constructs 4, 5, and 6 (Sirna Compound Nos. 31999/32000, 32001/32002, 32003/32004 respectively, Table III) at two concentrations (0.5 ng and 5 ng) using lipofectamine 2000. Cells were harvested 48 hours later and protein extracts run on SDS-PAGE, blotted to nitrocellulose, and probed with anti-myc antibodies. Neomycin phosphotransferase is expressed on the same plasmid as the myc-tagged construct, allowing for a transfection control. The experiment was run in duplicate. As shown in FIG. 30, the active siNA constructs (Sirna Compound Nos. 31993/31994, 31995/31996, 31997/31998) all demonstrate inhibition of HD82Q-myc compared with the inverted matched chemistry siNA constructs. Furthermore, the active siNA constructs show selectivity for inhibiting the myc tagged HD82Q compared to c-myc and the necomycin transfection control. Additional experiments are utilized to evaluate silencing of the full-length HD construct by western blot and QPCR. This rapid in vitro screen is useful for identifying effective siNA constructs prior to in vivo studies, utilizing for example N171-82Q mice.

### Example 10

### Indications

[0512] The present body of knowledge in HD research indicates the need for methods to assay HD activity and for compounds that can regulate HD expression for research, diagnostic, and therapeutic use. As described herein, the nucleic acid molecules of the present invention can be used in assays to diagnose disease state related of HD levels. In addition, the nucleic acid molecules can be used to treat disease state related to HD levels.

[0513] Particular conditions and disease states that can be associated with HD expression modulation include, but are not limited to Huntinton disease and related conditions such as progressive chorea, rigidity, dementia, and seizures, spinocerebellar ataxia, spinal and bulbar muscular dystrophy (SBMA), dentatorubropallidoluysian atrophy (DRPLA), and any other diseases or conditions that are related to or will respond to the levels of a repeat expansion (RE) protein in a cell or tissue, alone or in combination with other therapies.

[0514] The use of caspase inhibitors, agents that disrupt RE protein aggregation, and neuroprotective agents (e.g., pryridoxine) are non-limiting examples of chemotherapeutic agents that can be combined with or used in conjunction with the nucleic acid molecules (e.g. siNA molecules) of the instant invention. Those skilled in the art will recognize that other anti-cancer compounds and therapies can similarly be readily combined with the nucleic acid molecules of the instant invention (e.g. siNA molecules) and are hence within the scope of the instant invention.

### Example 11

### Multifunctional siNA Inhibition of Repeat Expansion (RE) RNA Expression

Multifunctional siNA Design

[0515] Once target sites have been identified for multifunctional siNA constructs, each strand of the siNA is designed with a complementary region of length, for example, of about 18 to about 28 nucleotides, that is complementary to a different target nucleic acid sequence. Each complementary region is designed with an adjacent flanking region of about 4 to about 22 nucleotides that is not complementary to the target sequence, but which comprises complementarity to the complementary region of the other sequence (see for example FIG. 16). Hairpin constructs can likewise be designed (see for example FIG. 17). Identification of complementary, palindrome or repeat sequences that are shared between the different target nucleic acid sequences can be used to shorten the overall length of the multifunctional siNA constructs (see for example FIGS. 18 and 19).

[0516] In a non-limiting example, three additional categories of additional multifunctional siNA designs are presented that allow a single siNA molecule to silence multiple targets. The first method utilizes linkers to join siNAs (or multiunctional siNAs) in a direct manner. This can allow the most potent siNAs to be joined without creating a long, continuous stretch of RNA that has potential to trigger an interferon response. The second method is a dendrimeric extension of the overlapping or the linked multifunctional design; or alternatively the organization of siNA in a supramolecular format. The third method uses helix lengths greater than 30 base pairs. Processing of these siNAs by Dicer will reveal new, active 5′ antisense ends. Therefore, the long siNAs can target the sites defined by the original 5′ ends and those defined by the new ends that are created by Dicer processing. When used in combination with traditional multifunctional siNAs (where the sense and antisense strands each define a target) the approach can be used for example to target 4 or more sites.

I. Tethered Bifunctional siNAs

[0517] The basic idea is a novel approach to the design of multifunctional siNAs in which two antisense siNA strands are annealed to a single sense strand. The sense strand oligonucleotide contains a linker (e.g., non-nulcoetide linker as described herein) and two segments that anneal to the antisense siNA strands (see FIG. 22). The linkers can also optionally comprise nucleotide-based linkers. Several potential advantages and variations to this approach include, but are not limited to:
[0518] 1. The two antisense siNAs are independent. Therefore, the choice of target sites is not constrained by a requirement for sequence conservation between two sites. Any two highly active siNAs can be combined to form a multifunctional siNA.
[0519] 2. When used in combination with target sites having homology, siNAs that target a sequence present in two genes (e.g., different repeat expansion (RE) isoforms), the design can be used to target more than two sites. A single multifunctional siNA can be for example, used to target RNA of two different repeat expansion (RE) RNAs.
[0520] 3. Multifunctional siNAs that use both the sense and antisense strands to target a gene can also be incorporated into a tethered multifuctional design. This leaves open the possibility of targeting 6 or more sites with a single complex.
[0521] 4. It can be possible to anneal more than two antisense strand siNAs to a single tethered sense strand.
[0522] 5. The design avoids long continuous stretches of dsRNA. Therefore, it is less likely to initiate an interferon response.
[0523] 6. The linker (or modifications attached to it, such as conjugates described herein) can improve the pharmacokinetic properties of the complex or improve its incorporation into liposomes. Modifications introduced to the linker should not impact siNA activity to the same extent that they would if directly attached to the siNA (see for example FIGS. 27 and 28).
[0524] 7. The sense strand can extend beyond the annealed antisense strands to provide additional sites for the attachment of conjugates.
[0525] 8. The polarity of the complex can be switched such that both of the antisense 3′ ends are adjacent to the linker and the 5′ ends are distal to the linker or combination thereof.
   Dendrimer and Supramolecular siNAs

[0526] In the dendrimer siNA approach, the synthesis of siNA is initiated by first synthesizing the dendrimer template followed by attaching various functional siNAs. Various constructs are depicted in FIG. 23. The number of functional siNAs that can be attached is only limited by the dimensions of the dendrimer used.

Supramolecular Approach to Multifunctional siNA

[0527] The supramolecular format simplifies the challenges of dendrimer synthesis. In this format, the siNA strands are synthesized by standard RNA chemistry, followed by annealing of various complementary strands. The individual strand synthesis contains an antisense sense sequence of one siNA at the 5′-end followed by a nucleic acid or synthetic linker, such as hexaethyleneglyol, which in turn is followed by sense strand of another siNA in 5′ to 3′ direction. Thus, the synthesis of siNA strands can be carried out in a standard 3′ to 5′ direction. Representative examples of trifunctional and tetrafunctional siNAs are depicted in FIG. 24. Based on a similar principle, higher functionality siNA constucts can be designed as long as efficient annealing of various strands is achieved.

Dicer Enabled Multifunctional siNA

[0528] Using bioinformatic analysis of multiple targets, stretches of identical sequences shared between differeing target sequences can be identified ranging from about two to about fourteen nucleotides in length. These identical regions can be designed into extended siNA helixes (e.g., >30 base pairs) such that the processing by Dicer reveals a secondary functional 5′-antisense site (see for example FIG. 25). For example, when the first 17 nucleotides of a siNA antisense strand (e.g., 21 nucleotide strands in a duplex with 3′-TT overhangs) are complementary to a target RNA, robust silencing was observed at 25 nM. 80% silencing was observed with only 16 nucleotide complementarity in the same format.

[0529] Incorporation of this property into the designs of siNAs of about 30 to 40 or more base pairs results in additional multifunctional siNA constructs. The example in FIG. 25 illustrates how a 30 base-pair duplex can target three distinct sequences after processing by Dicer-RNaseIII; these sequences can be on the same mRNA or separate RNAs, such as viral and host factor messages, or multiple points along a given pathway (e.g., inflammatory cascades). Furthermore, a 40 base-pair duplex can combine a bifunctional design in tandem, to provide a single duplex targeting four target sequences. An even more extensive approach can include use of homologous sequences to enable five or six targets silenced for one multifunctional duplex. The example in FIG. 25 demonstrates how this can be achieved. A 30 base pair duplex is cleaved by Dicer into 22 and 8 base pair products from either end (8 b.p. fragments not shown). For ease of presentation the overhangs generated by dicer are not shown—but can be compensated for. Three targeting sequences are shown. The required sequence identity overlapped is indicated by grey boxes. The N's of the parent 30 b.p. siNA are suggested sites of 2′-OH positions to enable Dicer cleavage if this is tested in stabilized chemistries. Note that processing of a 30mer duplex by Dicer RNase III does not give a precise 22+8 cleavage, but rather produces a series of closely related products (with 22+8 being the primary site). Therefore, processing by Dicer will yield a series of active siNAs. Another non-limiting example is shown in FIG. 26. A 40 base pair duplex is cleaved by Dicer into 20 base pair products from either end. For ease of presentation the overhangs generated by dicer are not shown—but can be compensated for. Four targeting sequences are shown in four colors, blue, light-blue and red and orange. The required sequence identity overlapped is indicated by grey boxes. This design format can be extended to larger RNAs. If chemically stabilized siNAs are bound by Dicer, then strategically located ribonucleotide linkages can enable designer cleavage products that permit our more extensive repertoire of multiifunctional designs. For example cleavage products not limited to the Dicer standard of approximately 22-nucleotides can allow multifunctional siNA constructs with a target sequence identity overlap ranging from, for example, about 3 to about 15 nucleotides.

### Example 12

### Diagnostic Uses

[0530] The siNA molecules of the invention can be used in a variety of diagnostic applications, such as in the identification of molecular targets (e.g., RNA) in a variety of applications, for example, in clinical, industrial, environmental, agricultural and/or research settings. Such diagnostic use of siNA molecules involves utilizing reconstituted RNAi systems, for example, using cellular lysates or partially purified cellular lysates. siNA molecules of this invention can be used as diagnostic tools to examine genetic drift and mutations within diseased cells or to detect the presence of endogenous or exogenous, for example viral, RNA in a cell. The close relationship between siNA activity and the structure of the target RNA allows the detection of mutations in any region of the molecule, which alters the base-pairing and three-dimensional structure of the target RNA. By using multiple siNA molecules described in this invention, one can map nucleotide changes, which are important to RNA structure and function in vitro, as well as in cells and tissues. Cleavage of target RNAs with siNA molecules can be used to inhibit gene expression and define the role of specified gene products in the progression of disease or infection. In this manner, other genetic targets can be defined as important mediators of the disease. These experiments will lead to better treatment of the disease progression by affording the possibility of combination therapies (e.g., multiple siNA molecules targeted to different genes, siNA molecules coupled with known small molecule inhibitors, or intermittent treatment with combinations siNA molecules and/or other chemical or biological molecules). Other in vitro uses of siNA molecules of this invention are well known in the art, and include detection of the presence of mRNAs associated with a disease, infection, or related condition. Such RNA is detected by determining the presence of a cleavage product after treatment with a siNA using standard methodologies, for example, fluorescence resonance emission transfer (FRET).

[0531] In a specific example, siNA molecules that cleave only wild-type or mutant forms of the target RNA are used for the assay. The first siNA molecules (i.e., those that cleave only wild-type forms of target RNA) are used to identify wild-type RNA present in the sample and the second siNA molecules (i.e., those that cleave only mutant forms of target RNA) are used to identify mutant RNA in the sample. As reaction controls, synthetic substrates of both wild-type and mutant RNA are cleaved by both siNA molecules to demonstrate the relative siNA efficiencies in the reactions and the absence of cleavage of the “non-targeted” RNA species. The cleavage products from the synthetic substrates also serve to generate size markers for the analysis of wild-type and mutant RNAs in the sample population. Thus, each analysis requires two siNA molecules, two substrates and one unknown sample, which is combined into six reactions. The presence of cleavage products is determined using an RNase protection assay so that full-length and cleavage fragments of each RNA can be analyzed in one lane of a polyacrylamide gel. It is not absolutely required to quantify the results to gain insight into the expression of mutant RNAs and putative risk of the desired phenotypic changes in target cells. The expression of mRNA whose protein product is implicated in the development of the phenotype (i.e., disease related or infection related) is adequate to establish risk. If probes of comparable specific activity are used for both transcripts, then a qualitative comparison of RNA levels is adequate and decreases the cost of the initial diagnosis. Higher mutant form to wild-type ratios are correlated with higher risk whether RNA levels are compared qualitatively or quantitatively.

[0532] All patents and publications mentioned in the specification are indicative of the levels of skill of those skilled in the art to which the invention pertains. All references cited in this disclosure are incorporated by reference to the same extent as if each reference had been incorporated by reference in its entirety individually.

[0533] One skilled in the art would readily appreciate that the present invention is well adapted to carry out the objects and obtain the ends and advantages mentioned, as well as those inherent therein. The methods and compositions described herein as presently representative of preferred embodiments are exemplary and are not intended as limitations on the scope of the invention. Changes therein and other uses will occur to those skilled in the art, which are encompassed within the spirit of the invention, are defined by the scope of the claims.

[0534] It will be readily apparent to one skilled in the art that varying substitutions and modifications can be made to the invention disclosed herein without departing from the scope and spirit of the invention. Thus, such additional embodiments are within the scope of the present invention and the following claims. The present invention teaches one skilled in the art to test various combinations and/or substitutions of chemical modifications described herein toward generating nucleic acid constructs with improved activity for mediating RNAi activity. Such improved activity can comprise improved stability, improved bioavailability, and/or improved activation of cellular responses mediating RNAi. Therefore, the specific embodiments described herein are not limiting and one skilled in the art can readily appreciate that specific combinations of the modifications described herein can be tested without undue experimentation toward identifying siNA molecules with improved RNAi activity.

[0535] The invention illustratively described herein suitably can be practiced in the absence of any element or elements, limitation or limitations that are not specifically disclosed herein. Thus, for example, in each instance herein any of the terms “comprising”, “consisting essentially of”, and “consisting of” may be replaced with either of the other two terms. The terms and expressions which have been employed are used as terms of description and not of limitation, and there is no intention that in the use of such terms and expressions of excluding any equivalents of the features shown and described or portions thereof, but it is recognized that various modifications are possible within the scope of the invention claimed. Thus, it should be understood that although the present invention has been specifically disclosed by preferred embodiments, optional features, modification and variation of the concepts herein disclosed may be resorted to by those skilled in the art, and that such modifications and variations are considered to be within the scope of this invention as defined by the description and the appended claims.

[0536] In addition, where features or aspects of the invention are described in terms of Markush groups or other grouping of alternatives, those skilled in the art will recognize that the invention is also thereby described in terms of any individual member or subgroup of members of the Markush group or other group.

TABLE I
POLYQ repeat Accession Numbers

NM_002111
Homo sapiens huntingtin (Huntington disease) (HD), mRNA
gi|38788404|ref|NM_002111.4|[38788404]
AB016794
Homo sapiens mRNA for huntingtin, complete cds
gi|4126798|dbj|AB016794.1|[4126798]
L12392
Homo sapiens Huntington's Disease (HD) mRNA, complete cds
gi|1709991|gb|L12392.1|HUMHDA[1709991]
AC005516
Homo sapiens Chromosome 4p16.3 BAC clone 399e10 containing
Huntington's Disease
gene; exons 1-67, complete sequence
gi|3900835|gb|AC005516.1|AC005516[3900835]
AL390059
Human DNA sequence from clone RP11-399E10 on chromosome 4,
complete sequence
gi|26984367|emb|AL390059.9|[26984367]
Z69837
Human DNA sequence from clone LA04NC01-113B6 on chromosome
4, complete sequence
gi|1212949|emb|Z69837.1|HSL113B6[1212949]
L20431
Homo sapiens Huntington disease-associated protein (HD)
mRNA, complete cds
gi|398028|gb|L20431.1|HUMHUNTDIS[398028]
NM_000332
Homo sapiens spinocerebellar ataxia 1 (olivopontocerebellar
ataxia 1, autosomal
dominant, ataxin 1) (SCA1), mRNA
gi|4506792|ref|NM_000332.1|[4506792]
X79204
H. sapiens SCA1 mRNA for ataxin
gi|529661|emb|X79204.1|HSSCA1[529661]
AL009031
Human DNA sequence from clone RP3-467D16 on chromosome
6p22.3-24.1 Contains the
5′ end of the SCA1 gene for spinocerebellar ataxia 1
(olivopontocerebellar
ataxia 1, autosomal dominant, ataxin 1) with a poly-
glutamine (CAG repeat)
polymorphism and the 3′ part of the GMPR gene for GMP
reductase, Guanosine
5′-monophosphate oxidoreductase, complete sequence
gi|2808422|emb|AL009031.1|HS467D16[2808422]
S64648
SCA1 {CAG repeat} [human, Genomic Mutant, 506 nt]
gi|407593|bbm|316393|bbs|136468|gb|S64648.1|S64648[407593]
BC047894
Homo sapiens spinocerebellar ataxia 1 (olivopontocerebellar
ataxia 1, autosomal
dominant, ataxin 1), mRNA (cDNA clone IMAGE: 4472404),
partial cds
gi|28839052|gb|BC047894.1|[28839052]
NM_002973
Homo sapiens spinocerebellar ataxia 2 (olivopontocerebellar
ataxia 2, autosomal
dominant, ataxin 2) (SCA2), mRNA
gi|4506794|ref|NM_002973.1|[4506794]
U70323
Human ataxin-2 (SCA2) mRNA, complete cds
gi|1679683|gb|U70323.1|HSU70323[1679683]
Y08262
H. sapiens mRNA for SCA2 protein
gi|1770389|emb|Y08262.1|HSDANSCA2[1770389]
AK095017
Homo sapiens cDNA FLJ37698 fis, clone BRHIP2015679, highly
similar to Human
ataxin-2 (SCA2) mRNA
gi|21754198|dbj|AK095017.1|[21754198]
BC033711
Homo sapiens Machado-Joseph disease (spinocerebellar ataxia
3,
olivopontocerebellar ataxia 3, autosomal dominant, ataxin
3), mRNA (cDNA clone
MGC: 44934 IMAGE: 4393766), complete cds
gi|21708051|gb|BC033711.1|[21708051]
U64822
Homo sapiens josephin MJD1 mRNA, partial cds
gi|2262198|gb|U64822.1|HSU64822[2262198]
S75313
MJD1 = MJD1 protein {CAG repeats} [human, brain, mRNA, 1776
nt]
gi|833927|bbm|360325|bbs|160590|gb|S75313.1|S75313[833927]
NM_004993
Homo sapiens Machado-Joseph disease (spinocerebellar ataxia
3,
olivopontocerebellar ataxia 3, autosomal dominant, ataxin
3) (MJD), transcript
variant 1, mRNA
gi|13518018|ref|NM_004993.2|[13518018]
U64821
Homo sapiens josephin MJD1 mRNA, cds
gi|2262196|gb|U64821.1|HSU64821[2262196]
U64820
Homo sapiens josephin MJD1 mRNA, complete cds
gi|2262194|gb|U64820.1|HSU64820[2262194]
AB050194
Homo sapiens mRNA for ataxin-3, complete cds
gi|11559485|dbj|AB050194.1[11559485]
NM_030660
Homo sapiens Machado-Joseph disease (spinocerebellar ataxia
3,
olivopontocerebellar ataxia 3, autosomal dominant, ataxin
3) (MJD), transcript
variant 2, mRNA
gi|13518012|ref|NM_030660.1|[13518012]
BC022245
Homo sapiens Machado-Joseph disease (spinocerebellar ataxia
3,
olivopontocerebellar ataxia 3, autosomal dominant, ataxin
3), mRNA (cDNA clone
IMAGE: 4717161), containing frame-shift errors
gi|18490814|gb|BC022245.1|[18490814]
AB038653
Homo sapiens genomic DNA, chromosome 14q32.1, BAC
clone: B445M7
gi|14149091|dbj|AB038653.1|[14149091]
AJ000501
Homo sapiens DNA for CAG/CTG repeat region
gi|2274960|emb|AJ000501.1|HSCAGCTG[2274960]
NM_000068
Homo sapiens calcium channel, voltage-dependent, P/Q type,
alpha 1A subunit
(CACNA1A), transcript variant 1, mRNA
gi|13386499|ref|NM_000068.2|[13386499]
NM_023035
Homo sapiens calcium channel, voltage-dependent, P/Q type,
alpha 1A subunit
(CACNA1A), transcript variant 2, mRNA
gi|13386497|ref|NM_023035.1|[13386497]
U79666
Homo sapiens alpha1A-voltage-dependent calcium channel
mRNA, splice form
BI-1-Vi-GGCAG, complete cds
gi|2281751|gb|U79666.1|HSU79666[2281751]
X99897
H. sapiens mRNA for P/Q-type calcium channel alphal subunit
gi|1657332|emb|X99897.1|HSPQCCA1[1657332]
AB035726
Homo sapiens CACNA1A mRNA for alpha1A-voltage-dependent
calcium channel, partial
cds, isolate: TMDN-SCA6-001
gi|7630180|dbj|AB035726.1|[7630180]
AF004883
Homo sapiens neuronal calcium channel alpha 1A subunit
isoform 1A-2 mRNA,
complete cds
gi|2213910|gb|AF004883.1|AF004883[2213910]
AF004884
Homo sapiens neuronal calcium channel alpha 1A subunit
isoform A-1 mRNA,
complete cds
gi|2213912|gb|AF004884.1|AF004884[2213912]
AB035727
Homo sapiens CACNA1A mRNA for alpha1A-voltage-dependent
calcium channel,
complete cds, isolate: TMDN-CNT-001
gi|9711928|dbj|AB035727.2|[9711928]
U06702
Human clone CCA54 mRNA containing CCA trinucleotide repeat
gi|476266|gb|U06702.1|HSU06702[476266]
NM_000333
Homo sapiens spinocerebellar ataxia 7 (olivopontocerebellar
atrophy with retinal
degeneration) (SCA7), mRNA
gi|4506796|ref|NM_000333.1|[4506796]
AJ000517
Homo Sapiens mRNA for spinocerebellar ataxia 7
gi|23701541|emb|AJ000517.1|HSSCA7[2370154]
AF032105
Homo sapiens ataxin-7 (SCA7) mRNA, complete cds
gi|3192953|gb|AF032105.1|AF032105[3192953]
AF032103
Homo sapiens ataxin-7 (SCA7) mRNA, 3′ end, partial cds
gi|3192949|gb|AF032103.1|AF032103[3192949]
AK125125
Homo sapiens cDNA FLJ43135 fis, clone CTONG3006629
gi|34531113|dbj|AK125125.1|[34531113]
AF020275
Homo sapiens expanded SCA7 CAG repeat
gi|2501955|gb|AF020275.1|AF020275[2501955]
NM_004576
Homo sapiens protein phosphatase 2 (formerly 2A),
regulatory subunit B (PR 52),
beta isoform (PPP2R2B), transcript variant 1, mRNA
gi|32307122|ref|NM_004576.2|[32307122]
M64930
Human protein phosphatase 2A beta subunit mRNA, complete
cds
gi|190423|gb|M64930.1|HUMPROP2AB[190423]
NM_181675
Homo sapiens protein phosphatase 2 (formerly 2A),
regulatory subunit B (PR 52),
beta isoform (PPP2R2B), transcript variant 3, mRNA
gi|32307114|ref|NM_181675.1|[32307114]
NM_181674
Homo sapiens protein phosphatase 2 (formerly 2A),
regulatory subunit B (PR 52),
beta isoform (PPP2R2B), transcript variant 2, mRNA
gi|32307112|ref|NM_181674.1|[32307112]
BC031790
Homo sapiens protein phosphatase 2 (formerly 2A),
regulatory subunit B (PR 52),
beta isoform, transcript variant 2, mRNA (cDNA clone
MGC: 24888 IMAGE: 4939981),
complete cds
gi|21619304|gb|BC031790.1|[21619304]
AK056192
Homo sapiens cDNA FLJ31630 fis, clone NT2RI2003361, highly
similar to PROTEIN
PHOSPHATASE PP2A, 55 KD REGULATORY SUBUNIT,
NEURONAL ISOFORM
gi|16551529|dbj|AK056192.1|[16551529]
NM_000044
Homo sapiens androgen receptor (dihydrotestosterone
receptor; testicular
feminization; spinal and bulbar muscular atrophy; Kennedy
disease) (AR), mRNA
gi|21322251|ref|NM_000044.2|[21322251]
M20132
Human androgen receptor (AR) mRNA, complete cds
gi|178627|gb|M20132.1|HUMANDREC[178627]
M21748
Human androgen receptor mRNA, complete cds, clones A1 and
J8
gi|178871|gb|M21748.1|HUMARA[178871]
M73069
Human androgen receptor mutant gene, mRNA, complete cds
gi|178655|gb|M73069.1|HUMANRE[178655]
BC051795
Homo sapiens dentatorubral-pallidoluysian atrophy
(atrophin-1), mRNA (cDNA clone
MGC: 57647 IMAGE: 4181592), complete cds
gi|34193087|gb|BC051795.2|[34193087]
NM_001940
Homo sapiens dentatorubral-pallidoluysian atrophy
(atrophin-1) (DRPLA), mRNA
gi|6005998|ref|NM_001940.2|[6005998]
U23851
Human atrophin-1 mRNA, complete cds
gi|915325|gb|U23851.1|HSU23851[915325]
D38529
Homo sapiens mRNA for DRPLA protein, complete cds
gi|1732443|dbj|D38529.1|HUMDRPLA[1732443]
D31840
Homo sapiens DRPLA mRNA, complete cds
gi|862329|dbj|D31840.1|HUMDRPLA1[862329]
AC006512
Homo sapiens 12 PAC RP3-461F17 (Roswell Park Cancer
Institute Human PAC Library)
complete sequence
gi|29469488|gb|AC006512.13|[29469488]

[0537] TABLE II

HD siNA and Target Sequences

| | | |
|---|---|---|
| Seq | Seq | Seq |

| | | | | | | | | | |
|---|---|---|---|---|---|---|---|---|---|
| dbSNP ID | Pos | Target Seq | ID | UPos | Upper seq | ID | LPos | Lower seq | ID |

| rs396875 | 85 | CAAUCAUGCUGGCCGGCGU | 1 | 85 | CAAUCAUGCUGGCCGGCGU | 1 | 103 | ACGCCGGCCAGCAUGAUUG | 1753 |
|---|---|---|---|---|---|---|---|---|---|
| rs396875 | 86 | AAUCAUGCUGGCCGGCGUG | 2 | 86 | AAUCAUGCUGGCCGGCGUG | 2 | 104 | CACGCCGGCCAGCAUGAUU | 1754 |
| rs396875 | 87 | AUCAUGCUGGCCGGCGUGG | 3 | 87 | AUCAUGCUGGCCGGCGUGG | 3 | 105 | CCACGCCGGCCAGCAUGAU | 1755 |
| rs396875 | 88 | UCAUGCUGGCCGGCGUGGC | 4 | 88 | UCAUGCUGGCCGGCGUGGC | 4 | 106 | GCCACGCCGGCCAGCAUGA | 1756 |
| rs396875 | 89 | CAUGCUGGCCGGCGUGGCC | 5 | 89 | CAUGCUGGCCGGCGUGGCC | 5 | 107 | GGCCACGCCGGCCAGCAUG | 1757 |
| rs396875 | 90 | AUGCUGGCCGGCGUGGCCC | 6 | 90 | AUGCUGGCCGGCGUGGCCC | 6 | 108 | GGGCCACGCCGGCCAGCAU | 1758 |
| rs396875 | 91 | UGCUGGCCGGCGUGGCCCC | 7 | 91 | UGCUGGCCGGCGUGGCCCC | 7 | 109 | GGGGCCACGCCGGCCAGCA | 1759 |
| rs396875 | 92 | GCUGGCCGGCGUGGCCCCG | 8 | 92 | GCUGGCCGGCGUGGCCCCG | 8 | 110 | CGGGGCCACGCCGGCCAGC | 1760 |
| rs396875 | 93 | CUGGCCGGCGUGGCCCCGC | 9 | 93 | CUGGCCGGCGUGGCCCCGC | 9 | 111 | GCGGGGCCACGCCGGCCAG | 1761 |
| rs396875 | 94 | UGGCCGGCGUGGCCCCGCC | 10 | 94 | UGGCCGGCGUGGCCCCGCC | 10 | 112 | GGCGGGGCCACGCCGGCCA | 1762 |
| rs396875 | 95 | GGCCGGCGUGGCCCCGCCU | 11 | 95 | GGCCGGCGUGGCCCCGCCU | 11 | 113 | AGGCGGGGCCACGCCGGCC | 1763 |
| rs396875 | 96 | GCCGGCGUGGCCCCGCCUC | 12 | 96 | GCCGGCGUGGCCCCGCCUC | 12 | 114 | GAGGCGGGGCCACGCCGGC | 1764 |
| rs396875 | 97 | CCGGCGUGGCCCCGCCUCC | 13 | 97 | CCGGCGUGGCCCCGCCUCC | 13 | 115 | GGAGGCGGGGCCACGCCGG | 1765 |
| rs396875 | 98 | CGGCGUGGCCCCGCCUCCG | 14 | 98 | CGGCGUGGCCCCGCCUCCG | 14 | 116 | CGGAGGCGGGGCCACGCCG | 1766 |
| rs396875 | 99 | GGCGUGGCCCCGCCUCCGC | 15 | 99 | GGCGUGGCCCCGCCUCCGC | 15 | 117 | GCGGAGGCGGGGCCACGCC | 1767 |
| rs396875 | 100 | GCGUGGCCCCGCCUCCGCC | 16 | 100 | GCGUGGCCCCGCCUCCGCC | 16 | 118 | GGCGGAGGCGGGGCCACGC | 1768 |
| rs396875 | 101 | CGUGGCCCCGCCUCCGCCG | 17 | 101 | CGUGGCCCCGCCUCCGCCG | 17 | 119 | CGGCGGAGGCGGGGCCACG | 1769 |
| rs396875 | 102 | GUGGCCCCGCCUCCGCCGG | 18 | 102 | GUGGCCCCGCCUCCGCCGG | 18 | 120 | CCGGCGGAGGCGGGGCCAC | 1770 |
| rs396875 | 103 | UGGCCCCGCCUCCGCCGGC | 19 | 103 | UGGCCCCGCCUCCGCCGGC | 19 | 121 | GCCGGCGGAGGCGGGGCCA | 1771 |
| rs396875 | 85 | CAAUCAUGCUGGCCGGCGC | 20 | 85 | CAAUCAUGCUGGCCGGCGC | 20 | 103 | GCGCCGGCCAGCAUGAUUG | 1772 |
| rs396875 | 86 | AAUCAUGCUGGCCGGCGCG | 21 | 86 | AAUCAUGCUGGCCGGCGCG | 21 | 104 | CGCGCCGGCCAGCAUGAUU | 1773 |
| rs396875 | 87 | AUCAUGCUGGCCGGCGCGG | 22 | 87 | AUCAUGCUGGCCGGCGCGG | 22 | 105 | CCGCGCCGGCCAGCAUGAU | 1774 |
| rs396875 | 88 | UCAUGCUGGCCGGCGCGGC | 23 | 88 | UCAUGCUGGCCGGCGCGGC | 23 | 106 | GCCGCGCCGGCCAGCAUGA | 1775 |
| rs396875 | 89 | CAUGCUGGCCGGCGCGGCC | 24 | 89 | CAUGCUGGCCGGCGCGGCC | 24 | 107 | GGCCGCGCCGGCCAGCAUG | 1776 |
| rs396875 | 90 | AUGCUGGCCGGCGCGGCCC | 25 | 90 | AUGCUGGCCGGCGCGGCCC | 25 | 108 | GGGCCGCGCCGGCCAGCAU | 1777 |
| rs396875 | 91 | UGCUGGCCGGCGCGGCCCC | 26 | 91 | UGCUGGCCGGCGCGGCCCC | 26 | 109 | GGGGCCGCGCCGGCCAGCA | 1778 |
| rs396875 | 92 | GCUGGCCGGCGCGGCCCCG | 27 | 92 | GCUGGCCGGCGCGGCCCCG | 27 | 110 | CGGGGCCGCGCCGGCCAGC | 1779 |
| rs396875 | 93 | CUGGCCGGCGCGGCCCCGC | 28 | 93 | CUGGCCGGCGCGGCCCCGC | 28 | 111 | GCGGGGCCGCGCCGGCCAG | 1780 |
| rs396875 | 94 | UGGCCGGCGCGGCCCCGCC | 29 | 94 | UGGCCGGCGCGGCCCCGCC | 29 | 112 | GGCGGGGCCGCGCCGGCCA | 1781 |
| rs396875 | 95 | GGCCGGCGCGGCCCCGCCU | 30 | 95 | GGCCGGCGCGGCCCCGCCU | 30 | 113 | AGGCGGGGCCGCGCCGGCC | 1782 |
| rs396875 | 96 | GCCGGCGCGGCCCCGCCUC | 31 | 96 | GCCGGCGCGGCCCCGCCUC | 31 | 114 | GAGGCGGGGCCGCGCCGGC | 1783 |
| rs396875 | 97 | CCGGCGCGGCCCCGCCUCC | 32 | 97 | CCGGCGCGGCCCCGCCUCC | 32 | 115 | GGAGGCGGGGCCGCGCCGG | 1784 |
| rs396875 | 98 | CGGCGCGGCCCCGCCUCCG | 33 | 98 | CGGCGCGGCCCCGCCUCCG | 33 | 116 | CGGAGGCGGGGCCGCGCCG | 1785 |
| rs396875 | 99 | GGCGCGGCCCCGCCUCCGC | 34 | 99 | GGCGCGGCCCCGCCUCCGC | 34 | 117 | GCGGAGGCGGGGCCGCGCC | 1786 |
| rs396875 | 100 | GCGCGGCCCCGCCUCCGCC | 35 | 100 | GCGCGGCCCCGCCUCCGCC | 35 | 118 | GGCGGAGGCGGGGCCGCGC | 1787 |
| rs396875 | 101 | CGCGGCCCCGCCUCCGCCG | 36 | 101 | CGCGGCCCCGCCUCCGCCG | 36 | 119 | CGGCGGAGGCGGGGCCGCG | 1788 |
| rs396875 | 102 | GCGGCCCCGCCUCCGCCGG | 37 | 102 | GCGGCCCCGCCUCCGCCGG | 37 | 120 | CCGGCGGAGGCGGGGCCGC | 1789 |
| rs396875 | 103 | CGGCCCCGCCUCCGCCGGC | 38 | 103 | CGGCCCCGCCUCCGCCGGC | 38 | 121 | GCCGGCGGAGGCGGGGCCG | 1790 |
| rs10701858 | 328 | GAAAAGCUGAUGAAGGCCU | 39 | 328 | GAAAAGCUGAUGAAGGCCU | 39 | 346 | AGGCCUUCAUCAGCUUUUC | 1791 |
| rs10701858 | 329 | AAAAGCUGAUGAAGGCCUU | 40 | 329 | AAAAGCUGAUGAAGGCCUU | 40 | 347 | AAGGCCUUCAUCAGCUUUU | 1792 |
| rs10701858 | 330 | AAAGCUGAUGAAGGCCUUC | 41 | 330 | AAAGCUGAUGAAGGCCUUC | 41 | 348 | GAAGGCCUUCAUCAGCUUU | 1793 |
| rs10701858 | 331 | AAGCUGAUGAAGGCCUUCG | 42 | 331 | AAGCUGAUGAAGGCCUUCG | 42 | 349 | CGAAGGCCUUCAUCAGCUU | 1794 |
| rs10701858 | 332 | AGCUGAUGAAGGCCUUCGA | 43 | 332 | AGCUGAUGAAGGCCUUCGA | 43 | 350 | UCGAAGGCCUUCAUCAGCU | 1795 |
| rs10701858 | 333 | GCUGAUGAAGGCCUUCGAG | 44 | 333 | GCUGAUGAAGGCCUUCGAG | 44 | 351 | CUCGAAGGCCUUCAUCAGC | 1796 |
| rs10701858 | 334 | CUGAUGAAGGCCUUCGAGU | 45 | 334 | CUGAUGAAGGCCUUCGAGU | 45 | 352 | ACUCGAAGGCCUUCAUCAG | 1797 |
| rs10701858 | 335 | UGAUGAAGGCCUUCGAGUC | 46 | 335 | UGAUGAAGGCCUUCGAGUC | 46 | 353 | GACUCGAAGGCCUUCAUCA | 1798 |
| rs10701858 | 336 | GAUGAAGGCCUUCGAGUCC | 47 | 336 | GAUGAAGGCCUUCGAGUCC | 47 | 354 | GGACUCGAAGGCCUUCAUC | 1799 |
| rs10701858 | 337 | AUGAAGGCCUUCGAGUCCC | 48 | 337 | AUGAAGGCCUUCGAGUCCC | 48 | 355 | GGGACUCGAAGGCCUUCAU | 1800 |
| rs10701858 | 338 | UGAAGGCCUUCGAGUCCCU | 49 | 338 | UGAAGGCCUUCGAGUCCCU | 49 | 356 | AGGGACUCGAAGGCCUUCA | 1801 |
| rs10701858 | 339 | GAAGGCCUUCGAGUCCCUC | 50 | 339 | GAAGGCCUUCGAGUCCCUC | 50 | 357 | GAGGGACUCGAAGGCCUUC | 1802 |
| rs10701858 | 340 | AAGGCCUUCGAGUCCCUCA | 51 | 340 | AAGGCCUUCGAGUCCCUCA | 51 | 358 | UGAGGGACUCGAAGGCCUU | 1803 |
| rs10701858 | 341 | AGGCCUUCGAGUCCCUCAA | 52 | 341 | AGGCCUUCGAGUCCCUCAA | 52 | 359 | UUGAGGGACUCGAAGGCCU | 1804 |
| rs10701858 | 342 | GGCCUUCGAGUCCCUCAAG | 53 | 342 | GGCCUUCGAGUCCCUCAAG | 53 | 360 | CUUGAGGGACUCGAAGGCC | 1805 |
| rs10701858 | 343 | GCCUUCGAGUCCCUCAAGU | 54 | 343 | GCCUUCGAGUCCCUCAAGU | 54 | 361 | ACUUGAGGGACUCGAAGGC | 1806 |
| rs10701858 | 344 | CCUUCGAGUCCCUCAAGU | 55 | 344 | CCUUCGAGUCCCUCAAGU | 55 | 362 | ACUUGAGGGACUCGAAGG | 1807 |
| rs10701858 | 328 | GAAAAGCUGAUGAAGGCCG | 56 | 328 | GAAAAGCUGAUGAAGGCCG | 56 | 346 | CGGCCUUCAUCAGCUUUUC | 1808 |
| rs10701858 | 329 | AAAAGCUGAUGAAGGCCGC | 57 | 329 | AAAAGCUGAUGAAGGCCGC | 57 | 347 | GCGGCCUUCAUCAGCUUUU | 1809 |
| rs10701858 | 330 | AAAGCUGAUGAAGGCCGCC | 58 | 330 | AAAGCUGAUGAAGGCCGCC | 58 | 348 | GGCGGCCUUCAUCAGCUUU | 1810 |
| rs10701858 | 331 | AAGCUGAUGAAGGCCGCCU | 59 | 331 | AAGCUGAUGAAGGCCGCCU | 59 | 349 | AGGCGGCCUUCAUCAGCUU | 1811 |
| rs10701858 | 332 | AGCUGAUGAAGGCCGCCUU | 60 | 332 | AGCUGAUGAAGGCCGCCUU | 60 | 350 | AAGGCGGCCUUCAUCAGCU | 1812 |
| rs10701858 | 333 | GCUGAUGAAGGCCGCCUUC | 61 | 333 | GCUGAUGAAGGCCGCCUUC | 61 | 351 | GAAGGCGGCCUUCAUCAGC | 1813 |
| rs10701858 | 334 | CUGAUGAAGGCCGCCUUCG | 62 | 334 | CUGAUGAAGGCCGCCUUCG | 62 | 352 | CGAAGGCGGCCUUCAUCAG | 1814 |
| rs10701858 | 335 | UGAUGAAGGCCGCCUUCGA | 63 | 335 | UGAUGAAGGCCGCCUUCGA | 63 | 353 | UCGAAGGCGGCCUUCAUCA | 1815 |
| rs10701858 | 336 | GAUGAAGGCCGCCUUCGAG | 64 | 336 | GAUGAAGGCCGCCUUCGAG | 64 | 354 | CUCGAAGGCGGCCUUCAUC | 1816 |
| rs10701858 | 337 | AUGAAGGCCGCCUUCGAGU | 65 | 337 | AUGAAGGCCGCCUUCGAGU | 65 | 355 | ACUCGAAGGCGGCCUUCAU | 1817 |
| rs10701858 | 338 | UGAAGGCCGCCUUCGAGUC | 66 | 338 | UGAAGGCCGCCUUCGAGUC | 66 | 356 | GACUCGAAGGCGGCCUUCA | 1818 |
| rs10701858 | 339 | GAAGGCCGCCUUCGAGUCC | 67 | 339 | GAAGGCCGCCUUCGAGUCC | 67 | 357 | GGACUCGAAGGCGGCCUUC | 1819 |
| rs10701858 | 340 | AAGGCCGCCUUCGAGUCCC | 68 | 340 | AAGGCCGCCUUCGAGUCCC | 68 | 358 | GGGACUCGAAGGCGGCCUU | 1820 |
| rs10701858 | 341 | AGGCCGCCUUCGAGUCCCU | 69 | 341 | AGGCCGCCUUCGAGUCCCU | 69 | 359 | AGGGACUCGAAGGCGGCCU | 1821 |
| rs10701858 | 342 | GGCCGCCUUCGAGUCCCUC | 70 | 342 | GGCCGCCUUCGAGUCCCUC | 70 | 360 | GAGGGACUCGAAGGCGGCC | 1822 |
| rs10701858 | 343 | GCCGCCUUCGAGUCCCUCA | 71 | 343 | GCCGCCUUCGAGUCCCUCA | 71 | 361 | UGAGGGACUCGAAGGCGGC | 1823 |
| rs10701858 | 344 | CCGCCUUCGAGUCCCUCAA | 72 | 344 | CCGCCUUCGAGUCCCUCAA | 72 | 362 | UUGAGGGACUCGAAGGCGG | 1824 |
| rs10701858 | 345 | CGCCUUCGAGUCCCUCAAG | 73 | 345 | CGCCUUCGAGUCCCUCAAG | 73 | 363 | CUUGAGGGACUCGAAGGCG | 1825 |
| rs1936033 | 1070 | UUUUGUUAAAGGCCUUCAU | 74 | 1070 | UUUUGUUAAAGGCCUUCAU | 74 | 1088 | AUGAAGGCCUUUAACAAAA | 1826 |
| rs1936033 | 1071 | UUUGUUAAAGGCCUUCAUA | 75 | 1071 | UUUGUUAAAGGCCUUCAUA | 75 | 1089 | UAUGAAGGCCUUUAACAAA | 1827 |
| rs1936033 | 1072 | UUGUUAAAGGCCUUCAUAG | 76 | 1072 | UUGUUAAAGGCCUUCAUAG | 76 | 1090 | CUAUGAAGGCCUUUAACAA | 1828 |
| rs1936033 | 1073 | UGUUAAAGGCCUUCAUAGC | 77 | 1073 | UGUUAAAGGCCUUCAUAGC | 77 | 1091 | GCUAUGAAGGCCUUUAACA | 1829 |
| rs1936033 | 1074 | GUUAAAGGCCUUCAUAGCG | 78 | 1074 | GUUAAAGGCCUUCAUAGCG | 78 | 1092 | CGCUAUGAAGGCCUUUAAC | 1830 |
| rs1936033 | 1075 | UUAAAGGCCUUCAUAGCGA | 79 | 1075 | UUAAAGGCCUUCAUAGCGA | 79 | 1093 | UCGCUAUGAAGGCCUUUAA | 1831 |
| rs1936033 | 1076 | UAAAGGCCUUCAUAGCGAA | 80 | 1076 | UAAAGGCCUUCAUAGCGAA | 80 | 1094 | UUCGCUAUGAAGGCCUUUA | 1832 |
| rs1936033 | 1077 | AAAGGCCUUCAUAGCGAAC | 81 | 1077 | AAAGGCCUUCAUAGCGAAC | 81 | 1095 | GUUCGCUAUGAAGGCCUUU | 1833 |
| rs1936033 | 1078 | AAGGCCUUCAUAGCGAACC | 82 | 1078 | AAGGCCUUCAUAGCGAACC | 82 | 1096 | GGUUCGCUAUGAAGGCCUU | 1834 |
| rs1936033 | 1079 | AGGCCUUCAUAGCGAACCU | 83 | 1079 | AGGCCUUCAUAGCGAACCU | 83 | 1097 | AGGUUCGCUAUGAAGGCCU | 1835 |
| rs1936033 | 1080 | GGCCUUCAUAGCGAACCUG | 84 | 1080 | GGCCUUCAUAGCGAACCUG | 84 | 1098 | CAGGUUCGCUAUGAAGGCC | 1836 |
| rs1936033 | 1081 | GCCUUCAUAGCGAACCUGA | 85 | 1081 | GCCUUCAUAGCGAACCUGA | 85 | 1099 | UCAGGUUCGCUAUGAAGGC | 1837 |
| rs1936033 | 1082 | CCUUCAUAGCGAACCUGAA | 86 | 1082 | CCUUCAUAGCGAACCUGAA | 86 | 1100 | UUCAGGUUCGCUAUGAAGG | 1838 |
| rs1936033 | 1083 | CUUCAUAGCGAACCUGAAG | 87 | 1083 | CUUCAUAGCGAACCUGAAG | 87 | 1101 | CUUCAGGUUCGCUAUGAAG | 1839 |
| rs1936033 | 1084 | UUCAUAGCGAACCUGAAGU | 88 | 1084 | UUCAUAGCGAACCUGAAGU | 88 | 1102 | ACUUCAGGUUCGCUAUGAA | 1840 |
| rs1936033 | 1085 | UCAUAGCGAACCUGAAGUC | 89 | 1085 | UCAUAGCGXACCUGAAGUC | 89 | 1103 | GACUUCAGGUUCGCUAUGA | 1841 |
| rs1936033 | 1086 | CAUAGCGAACCUGAAGUCA | 90 | 1086 | CAUAGCGAACCUGAAGUCA | 90 | 1104 | UGACUUCAGGUUCGCUAUG | 1842 |
| rs1936033 | 1087 | AUAGCGAACCUGAAGUCAA | 91 | 1087 | AUAGCGAACCUGAAGUCAA | 91 | 1105 | UUGACUUCAGGUUCGCUAU | 1843 |
| rs1936033 | 1088 | UAGCGAACCUGAAGUCAAG | 92 | 1088 | UAGCGAACCUGAAGUCAAG | 92 | 1106 | CUUGACUUCAGGUUCGCUA | 1844 |
| rs1936033 | 1070 | UUUUGUUAAAGGCCUUCAC | 93 | 1070 | UUUUGUUAAAGGCCUUCAC | 93 | 1088 | GUGAAGGCCUUUAACAAAA | 1845 |
| rs1936033 | 1071 | UUUGUUAAAGGCCUUCACA | 94 | 1071 | UUUGUUAAAGGCCUUCACA | 94 | 1089 | UGUGAAGGCCUUUAACAAA | 1846 |
| rs1936033 | 1072 | UUGUUAAAGGCCUUCACAG | 95 | 1072 | UUGUUAAAGGCCUUCACAG | 95 | 1090 | CUGUGAAGGCCUUUAACAA | 1847 |
| rs1936033 | 1073 | UGUUAAAGGCCUUCACAGC | 96 | 1073 | UGUUAAAGGCCUUCACAGC | 96 | 1091 | GCUGUGAAGGCCUUUAACA | 1848 |
| rs1936033 | 1074 | GUUAAAGGCCUUCACAGCG | 97 | 1074 | GUUAAAGGCCUUCACAGCG | 97 | 1092 | CGCUGUGAAGGCCUUUAAC | 1849 |
| rs1936033 | 1075 | UUAAAGGCCUUCACAGCGA | 98 | 1075 | UUAAAGGCCUUCACAGCGA | 98 | 1093 | UCGCUGUGAAGGCCUUUAA | 1850 |
| rs1936033 | 1076 | UAAAGGCCUUCACAGCGAA | 99 | 1076 | UAAAGGCCUUCACAGCGAA | 99 | 1094 | UUCGCUGUGAAGGCCUUUA | 1851 |
| rs1936033 | 1077 | AAAGGCCUUCACAGCGAAC | 100 | 1077 | AAAGGCCUUCACAGCGAAC | 100 | 1095 | GUUCGCUGUGAAGGCCUUU | 1852 |
| rs1936033 | 1078 | AAGGCCUUCACAGCGAACC | 101 | 1078 | AAGGCCUUCACAGCGAACC | 101 | 1096 | GGUUCGCUGUGAAGGCCUU | 1853 |
| rs1936033 | 1079 | AGGCCUUCACAGCGAACCU | 102 | 1079 | AGGCCUUCACAGCGAACCU | 102 | 1097 | AGGUUCGCUGUGAAGGCCU | 1854 |
| rs1936033 | 1080 | GGCCUUCACAGCGAACCUG | 103 | 1080 | GGCCUUCACAGCGAACCUG | 103 | 1098 | CAGGUUCGCUGUGAAGGCC | 1855 |
| rs1936033 | 1081 | GCCUUCACAGCGAACCUGA | 104 | 1081 | GCCUUCACAGCGAACCUGA | 104 | 1099 | UCAGGUUCGCUGUGAAGGC | 1856 |
| rs1936033 | 1082 | CCUUCACAGCGAACCUGAA | 105 | 1082 | CCUUCACAGCGAACCUGAA | 105 | 1100 | UUCAGGUUCGCUGUGAAGG | 1857 |
| rs1936033 | 1083 | CUUCACAGCGAACCUGAAG | 106 | 1083 | CUUCACAGCGAACCUGAAG | 106 | 1101 | CUUCAGGUUCGCUGUGAAG | 1858 |
| rs1936033 | 1084 | UUCACAGCGAACCUGAAGU | 107 | 1084 | UUCACAGCGAACCUGAAGU | 107 | 1102 | ACUUCAGGUUCGCUGUGAA | 1859 |
| rs1936033 | 1085 | UCACAGCGAACCUGAAGUC | 108 | 1085 | UCACAGCGAACCUGAAGUC | 108 | 1103 | GACUUCAGGUUCGCUGUGA | 1860 |
| rs1936033 | 1086 | CACAGCGAACCUGAAGUCA | 109 | 1086 | CACAGCGAACCUGAAGUCA | 109 | 1104 | UGACUUCAGGUUCGCUGUG | 1861 |
| rs1936033 | 1087 | ACAGCGAACCUGAAGUCAA | 110 | 1087 | ACAGCGAACCUGAAGUCAA | 110 | 1105 | UUGACUUCAGGUUCGCUGU | 1862 |
| rs1936033 | 1088 | CAGCGAACCUGAAGUCAAG | 111 | 1088 | CAGCGAACCUGAAGUCAAG | 111 | 1106 | CUUGACUUCAGGUUCGCUG | 1863 |
| rs1936032 | 1188 | UUGGCUACUAAAUGUGCUC | 112 | 1188 | UUGGCUACUAAAUGUGCUC | 112 | 1206 | GAGCACAUUUAGUAGCCAA | 1864 |
| rs1936032 | 1189 | UGGCUACUAAAUGUGCUCU | 113 | 1189 | UGGCUACUAAAUGUGCUCU | 113 | 1207 | AGAGCACAUUUAGUAGCCA | 1865 |
| rs1936032 | 1190 | GGCUACUAAAUGUGCUCUU | 114 | 1190 | GGCUACUAAAUGUGCUCUU | 114 | 1208 | AAGAGCACAUUUAGUAGCC | 1866 |
| rs1936032 | 1191 | GCUACUAAAUGUGCUCUUA | 115 | 1191 | GCUACUAAAUGUGCUCUUA | 115 | 1209 | UAAGAGCACAUUUAGUAGC | 1867 |
| rs1936032 | 1192 | CUACUAAAUGUGCUCUUAG | 116 | 1192 | CUACUAAAUGUGCUCUUAG | 116 | 1210 | CUAAGAGCACAUUUAGUAG | 1868 |
| rs1936032 | 1193 | UACUAAAUGUGCUCUUAGG | 117 | 1193 | UACUAAAUGUGCUCUUAGG | 117 | 1211 | CCUAAGAGCACAUUUAGUA | 1869 |
| rs1936032 | 1194 | ACUAAAUGUGCUCUUAGGC | 118 | 1194 | ACUAAAUGUGCUCUUAGGC | 118 | 1212 | GCCUAAGAGCACAUUUAGU | 1870 |
| rs1936032 | 1195 | CUAAAUGUGCUCUUAGGCU | 119 | 1195 | CUAAAUGUGCUCUUAGGCU | 119 | 1213 | AGCCUAAGAGCACAUUUAG | 1871 |
| rs1936032 | 1196 | UAAAUGUGCUCUUAGGCUU | 120 | 1196 | UAAAUGUGCUCUUAGGCUU | 120 | 1214 | AAGCCUAAGAGCACAUUUA | 1872 |
| rs1936032 | 1197 | AAAUGUGCUCUUAGGCUUA | 121 | 1197 | AAAUGUGCUCUUAGGCUUA | 121 | 1215 | UAAGCCUAAGAGCACAUUU | 1873 |
| rs1936032 | 1198 | AAUGUGCUCUUAGGCUUAC | 122 | 1198 | AAUGUGCUCUUAGGCUUAC | 122 | 1216 | GUAAGCCUAAGAGCACAUU | 1874 |
| rs1936032 | 1199 | AUGUGCUCUUAGGCUUACU | 123 | 1199 | AUGUGCUCUUAGGCUUACU | 123 | 1217 | AGUAAGCCUAAGAGCACAU | 1875 |
| rs1936032 | 1200 | UGUGCUCUUAGGCUUACUC | 124 | 1200 | UGUGCUCUUAGGCUUACUC | 124 | 1218 | GAGUAAGCCUAAGAGCACA | 1876 |
| rs1936032 | 1201 | GUGCUCUUAGGCUUACUCG | 125 | 1201 | GUGCUCUUAGGCUUACUCG | 125 | 1219 | CGAGUAAGCCUAAGAGCAC | 1877 |
| rs1936032 | 1202 | UGCUCUUAGGCUUACUCGU | 126 | 1202 | UGCUCUUAGGCUUACUCGU | 126 | 1220 | ACGAGUAAGCCUAAGAGCA | 1878 |
| rs1936032 | 1203 | GCUCUUAGGCUUACUCGUU | 127 | 1203 | GCUCUUAGGCUUACUCGUU | 127 | 1221 | AACGAGUAAGCCUAAGAGC | 1879 |
| rs1936032 | 1204 | CUCUUAGGCUUACUCGUUC | 128 | 1204 | CUCUUAGGCUUACUCGUUC | 128 | 1222 | GAACGAGUAAGCCUAAGAG | 1880 |
| rs1936032 | 1205 | UCUUAGGCUUACUCGUUCC | 129 | 1205 | UCUUAGGCUUACUCGUUCC | 129 | 1223 | GGAACGAGUAAGCCUAAGA | 1881 |
| rs1936032 | 1206 | CUUAGGCUUACUCGUUCCU | 130 | 1206 | CUUAGGCUUACUCGUUCCU | 130 | 1224 | AGGAACGAGUAAGCCUAAG | 1882 |
| rs1936032 | 1188 | UUGGCUACUAAAUGUGCUG | 131 | 1188 | UUGGCUACUAAAUGUGCUG | 131 | 1206 | CAGCACAUUUAGUAGCCAA | 1883 |
| rs1936032 | 1189 | UGGCUACUAAAUGUGCUGU | 132 | 1189 | UGGCUACUAAAUGUGCUGU | 132 | 1207 | ACAGCACAUUUAGUAGCCA | 1884 |
| rs1936032 | 1190 | GGCUACUAAAUGUGCUGUU | 133 | 1190 | GGCUACUAAAUGUGCUGUU | 133 | 1208 | AACAGCACAUUUAGUAGCC | 1885 |
| rs1936032 | 1191 | GCUACUAAAUGUGCUGUUA | 134 | 1191 | GCUACUAAAUGUGCUGUUA | 134 | 1209 | UAACAGCACAUUUAGUAGC | 1886 |
| rs1936032 | 1192 | CUACUAAAUGUGCUGUUAG | 135 | 1192 | CUACUAAAUGUGCUGUUAG | 135 | 1210 | CUAACAGCACAUUUAGUAG | 1887 |
| rs1936032 | 1193 | UACUAAAUGUGCUGUUAGG | 136 | 1193 | UACUAAAUGUGCUGUUAGG | 136 | 1211 | CCUAACAGCACAUUUAGUA | 1888 |
| rs1936032 | 1194 | ACUAAAUGUGCUGUUAGGC | 137 | 1194 | ACUAAAUGUGCUGUUAGGC | 137 | 1212 | GCCUAACAGCACAUUUAGU | 1889 |
| rs1936032 | 1195 | CUAAAUGUGCUGUUAGGCU | 138 | 1195 | CUAAAUGUGCUGUUAGGCU | 138 | 1213 | AGCCUAACAGCACAUUUAG | 1890 |
| rs1936032 | 1196 | UAAAUGUGCUGUUAGGCUU | 139 | 1196 | UAAAUGUGCUGUUAGGCUU | 139 | 1214 | AAGCCUAACAGCACAUUUA | 1891 |
| rs1936032 | 1197 | AAAUGUGCUGUUAGGCUUA | 140 | 1197 | PAAUGUGCUGUUAGGCUUA | 140 | 1215 | UAAGCCUAACAGCACAUUU | 1892 |
| rs1936032 | 1198 | AAUGUGCUGUUAGGCUUAC | 141 | 1198 | AAUGUGCUGUUAGGCUUAC | 141 | 1216 | GUAAGCCUAACAGCACAUU | 1893 |
| rs1936032 | 1199 | AUGUGCUGUUAGGCUUACU | 142 | 1199 | AUGUGCUGUUAGGCUUACU | 142 | 1217 | AGUAAGCCUAACAGCACAU | 1894 |
| rs1936032 | 1200 | UGUGCUGUUAGGCUUACUC | 143 | 1200 | UGUGCUGUUAGGCUUACUC | 143 | 1218 | GAGUAAGCCUAACAGCACA | 1895 |
| rs1936032 | 1201 | GUGCUGUUAGGCUUACUCG | 144 | 1201 | GUGCUGUUAGGCUUACUCG | 144 | 1219 | CGAGUAAGCCUAACAGCAC | 1896 |
| rs1936032 | 1202 | UGCUGUUAGGCUUACUCGU | 145 | 1202 | UGCUGUUAGGCUUACUCGU | 145 | 1220 | ACGAGUAAGCCUAACAGCA | 1897 |
| rs1936032 | 1203 | GCUGUUAGGCUUACUCGUU | 146 | 1203 | GCUGUUAGGCUUACUCGUU | 146 | 1221 | AACGAGUAAGCCUAACAGC | 1898 |
| rs1936032 | 1204 | CUGUUAGGCUUACUCGUUC | 147 | 1204 | CUGUUAGGCUUACUCGUUC | 147 | 1222 | GAACGAGUAAGCCUAACAG | 1899 |
| rs1936032 | 1205 | UGUUAGGCUUACUCGUUCC | 148 | 1205 | UGUUAGGCUUACUCGUUCC | 148 | 1223 | GGAACGAGUAAGCCUAACA | 1900 |
| rs1936032 | 1206 | GUUAGGCUUACUCGUUCCU | 149 | 1206 | GUUAGGCUUACUCGUUCCU | 149 | 1224 | AGGAACGAGUAAGCCUAAC | 1901 |
| rs1065745 | 1491 | GCUUCUGCAAACCCUGACC | 150 | 1491 | GCUUCUGCAAACCCUGACC | 150 | 1509 | GGUCAGGGUUUGCAGAAGC | 1902 |
| rs1065745 | 1492 | CUUCUGCAAACCCUGACCG | 151 | 1492 | CUUCUGCAAACCCUGACCG | 151 | 1510 | CGGUCAGGGUUUGCAGAAG | 1903 |
| rs1065745 | 1493 | UUCUGCAAACCCUGACCGC | 152 | 1493 | UUCUGCAAACCCUGACCGC | 152 | 1511 | GCGGUCAGGGUUUGCAGAA | 1904 |
| rs1065745 | 1494 | UCUGCAPACCCUGACCGCA | 153 | 1494 | UCUGCAAACCCUGACCGCA | 153 | 1512 | UGCGGUCAGGGUUUGCAGA | 1905 |
| rs1065745 | 1495 | CUGCAAACCCUGACCGCAG | 154 | 1495 | CUGCAAACCCUGACCGCAG | 154 | 1513 | CUGCGGUCAGGGUUUGCAG | 1906 |
| rs1065745 | 1496 | UGCAAACCCUGACCGCAGU | 155 | 1496 | UGCAAACCCUGACCGCAGU | 155 | 1514 | ACUGCGGUCAGGGUUUGCA | 1907 |
| rs1065745 | 1497 | GCAAACCCUGACCGCAGUC | 156 | 1497 | GCAAACCCUGACCGCAGUC | 156 | 1515 | GACUGCGGUCAGGGUUUGC | 1908 |
| rs1065745 | 1498 | CAAACCCUGACCGCAGUCG | 157 | 1498 | CAAACCCUGACCGCAGUCG | 157 | 1516 | CGACUGCGGUCAGGGUUUG | 1909 |
| rs1065745 | 1499 | AAACCCUGACCGCAGUCGG | 158 | 1499 | AAACCCUGACCGCAGUCGG | 158 | 1517 | CCGACUGCGGUCAGGGUUU | 1910 |
| rs1065745 | 1500 | AACCCUGACCGCAGUCGGG | 159 | 1500 | AACCCUGACCGCAGUCGGG | 159 | 1518 | CCCGACUGCGGUCAGGGUU | 1911 |
| rs1065745 | 1501 | ACCCUGACCGCAGUCGGGG | 160 | 1501 | ACCCUGACCGCAGUCGGGG | 160 | 1519 | CCCCGACUGCGGUCAGGGU | 1912 |
| rs1065745 | 1502 | CCCUGACCGCAGUCGGGGG | 161 | 1502 | CCCUGACCGCAGUCGGGGG | 161 | 1520 | CCCCCGACUGCGGUCAGGG | 1913 |
| rs1065745 | 1503 | CCUGACCGCAGUCGGGGGC | 162 | 1503 | CCUGACCGCAGUCGGGGGC | 162 | 1521 | GCCCCCGACUGCGGUCAGG | 1914 |
| rs1065745 | 1504 | CUGACCGCAGUCGGGGGCA | 163 | 1504 | CUGACCGCAGUCGGGGGCA | 163 | 1522 | UGCCCCCGACUGCGGUCAG | 1915 |
| rs1065745 | 1505 | UGACCGCAGUCGGGGGCAU | 164 | 1505 | UGACCGCAGUCGGGGGCAU | 164 | 1523 | AUGCCCCCGACUGCGGUCA | 1916 |
| rs1065745 | 1506 | GACCGCAGUCGGGGGCAUU | 165 | 1506 | GACCGCAGUCGGGGGCAUU | 165 | 1524 | AAUGCCCCCGACUGCGGUC | 1917 |
| rs1065745 | 1507 | ACCGCAGUCGGGGGCAUUG | 166 | 1507 | ACCGCAGUCGGGGGCAUUG | 166 | 1525 | CAAUGCCCCCGACUGCGGU | 1918 |
| rs1065745 | 1508 | CCGCAGUCGGGGGCAUUGG | 167 | 1508 | CCGCAGUCGGGGGCAUUGG | 167 | 1526 | CCAAUGCCCCCGACUGCGG | 1919 |
| rs1065745 | 1509 | CGCAGUCGGGGGCAUUGGG | 168 | 1509 | CGCAGUCGGGGGCAUUGGG | 168 | 1527 | CCCAAUGCCCCCGACUGCG | 1920 |
| rs1065745 | 1491 | GCUUCUGCAAACCCUGACU | 169 | 1491 | GCUUCUGCAAACCCUGACU | 169 | 1509 | AGUCAGGGUUUGCAGAAGC | 1921 |
| rs1065745 | 1492 | CUUCUGCAAACCCUGACUG | 170 | 1492 | CUUCUGCAAACCCUGACUG | 170 | 1510 | CAGUCAGGGUUUGCAGAAG | 1922 |
| rs1065745 | 1493 | UUCUGCAAACCCUGACUGC | 171 | 1493 | UUCUGCAAACCCUGACUGC | 171 | 1511 | GCAGUCAGGGUUUGCAGAA | 1923 |
| rs1065745 | 1494 | UCUGCAAACCCUGACUGCA | 172 | 1494 | UCUGCAAACCCUGACUGCA | 172 | 1512 | UGCAGUCAGGGUUUGCAGA | 1924 |
| rs1065745 | 1495 | CUGCAAACCCUGACUGCAG | 173 | 1495 | CUGCAAACCCUGACUGCAG | 173 | 1513 | CUGCAGUCAGGGUUUGCAG | 1925 |
| rs1065745 | 1496 | UGCAAACCCUGACUGCAGU | 174 | 1496 | UGCAAACCCUGACUGCAGU | 174 | 1514 | ACUGCAGUCAGGGUUUGCA | 1926 |
| rs1065745 | 1497 | GCAAACCCUGACUGCAGUC | 175 | 1497 | GCAAACCCUGACUGCAGUC | 175 | 1515 | GACUGCAGUCAGGGUUUGC | 1927 |
| rs1065745 | 1498 | CAAACCCUGACUGCAGUCG | 176 | 1498 | CAAACCCUGACUGCAGUCG | 176 | 1516 | CGACUGCAGUCAGGGUUUG | 1928 |
| rs1065745 | 1499 | AAACCCUGACUGCAGUCGG | 177 | 1499 | AAACCCUGACUGCAGUCGG | 177 | 1517 | CCGACUGCAGUCAGGGUUU | 1929 |
| rs1065745 | 1500 | AACCCUGACUGCAGUCGGG | 178 | 1500 | AACCCUGACUGCAGUCGGG | 178 | 1518 | CCCGACUGCAGUCAGGGUU | 1930 |
| rs1065745 | 1501 | ACCCUGACUGCAGUCGGGG | 179 | 1501 | ACCCUGACUGCAGUCGGGG | 179 | 1519 | CCCCGACUGCAGUCAGGGU | 1931 |
| rs1065745 | 1502 | CCCUGACUGCAGUCGGGGG | 180 | 1502 | CCCUGACUGCAGUCGGGGG | 180 | 1520 | CCCCCGACUGCAGUCAGGG | 1932 |
| rs1065745 | 1503 | CCUGACUGCAGUCGGGGGC | 181 | 1503 | CCUGACUGCAGUCGGGGGC | 181 | 1521 | GCCCCCGACUGCAGUCAGG | 1933 |
| rs1065745 | 1504 | CUGACUGCAGUCGGGGGCA | 182 | 1504 | CUGACUGCAGUCGGGGGCA | 182 | 1522 | UGCCCCCGACUGCAGUCAG | 1934 |
| rs1065745 | 1505 | UGACUGCAGUCGGGGGCAU | 183 | 1505 | UGACUGCAGUCGGGGGCAU | 183 | 1523 | AUGCCCCCGACUGCAGUCA | 1935 |
| rs1065745 | 1506 | GACUGCAGUCGGGGGCAUU | 184 | 1506 | GACUGCAGUCGGGGGCAUU | 184 | 1524 | AAUGCCCCCGACUGCAGUC | 1936 |
| rs1065745 | 1507 | ACUGCAGUCGGGGGCAUUG | 185 | 1507 | ACUGCAGUCGGGGGCAUUG | 185 | 1525 | CAAUGCCCCCGACUGCAGU | 1937 |
| rs1065745 | 1508 | CUGCAGUCGGGGGCAUUGG | 186 | 1508 | CUGCAGUCGGGGGCAUUGG | 186 | 1526 | CCAAUGCCCCCGACUGCAG | 1938 |
| rs1065745 | 1509 | UGCAGUCGGGGGCAUUGGG | 187 | 1509 | UGCAGUCGGGGGCAUUGGG | 187 | 1527 | CCCAAUGCCCCCGACUGCA | 1939 |
| rs2301367 | 1839 | GGCGGACUCAGUGGAUCUG | 188 | 1839 | GGCGGACUCAGUGGAUCUG | 188 | 1857 | CAGAUCCACUGAGUCCGCC | 1940 |
| rs2301367 | 1840 | GCGGACUCAGUGGAUCUGG | 189 | 1840 | GCGGACUCAGUGGAUCUGG | 189 | 1858 | CCAGAUCCACUGAGUCCGC | 1941 |
| rs2301367 | 1841 | CGGACUCAGUGGAUCUGGC | 190 | 1841 | CGGACUCAGUGGAUCUGGC | 190 | 1859 | GCCAGAUCCACUGAGUCCG | 1942 |
| rs2301367 | 1842 | GGACUCAGUGGAUCUGGCC | 191 | 1842 | GGACUCAGUGGAUCUGGCC | 191 | 1860 | GGCCAGAUCCACUGAGUCC | 1943 |
| rs2301367 | 1843 | GACUCAGUGGAUCUGGCCA | 192 | 1843 | GACUCAGUGGAUCUGGCCA | 192 | 1861 | UGGCCAGAUCCACUGAGUC | 1944 |
| rs2301367 | 1844 | ACUCAGUGGAUCUGGCCAG | 193 | 1844 | ACUCAGUGGAUCUGGCCAG | 193 | 1862 | CUGGCCAGAUCCACUGAGU | 1945 |
| rs2301367 | 1845 | CUCAGUGGAUCUGGCCAGC | 194 | 1845 | CUCAGUGGAUCUGGCCAGC | 194 | 1863 | GCUGGCCAGAUCCACUGAG | 1946 |
| rs2301367 | 1846 | UCAGUGGAUCUGGCCAGCU | 195 | 1846 | UCAGUGGAUCUGGCCAGCU | 195 | 1864 | AGCUGGCCAGAUCCACUGA | 1947 |
| rs2301367 | 1847 | CAGUGGAUCUGGCCAGCUG | 196 | 1847 | CAGUGGAUCUGGCCAGCUG | 196 | 1865 | CAGCUGGCCAGAUCCACUG | 1948 |
| rs2301367 | 1848 | AGUGGAUCUGGCCAGCUGU | 197 | 1848 | AGUGGAUCUGGCCAGCUGU | 197 | 1866 | ACAGCUGGCCAGAUCCACU | 1949 |
| rs2301367 | 1849 | GUGGAUCUGGCCAGCUGUG | 198 | 1849 | GUGGAUCUGGCCAGCUGUG | 198 | 1867 | CACAGCUGGCCAGAUCCAC | 1950 |
| rs2301367 | 1850 | UGGAUCUGGCCAGCUGUGA | 199 | 1850 | UGGAUCUGGCCAGCUGUGA | 199 | 1868 | UCACAGCUGGCCAGAUCCA | 1951 |
| rs2301367 | 1851 | GGAUCUGGCCAGCUGUGAC | 200 | 1851 | GGAUCUGGCCAGCUGUGAC | 200 | 1869 | GUCACAGCUGGCCAGAUCC | 1952 |
| rs2301367 | 1852 | GAUCUGGCCAGCUGUGACU | 201 | 1852 | GAUCUGGCCAGCUGUGACU | 201 | 1870 | AGUCACAGCUGGCCAGAUC | 1953 |
| rs2301367 | 1853 | AUCUGGCCAGCUGUGACUU | 202 | 1853 | AUCUGGCCAGCUGUGACUU | 202 | 1871 | AAGUCACAGCUGGCCAGAU | 1954 |
| rs2301367 | 1854 | UCUGGCCAGCUGUGACUUG | 203 | 1854 | UCUGGCCAGCUGUGACUUG | 203 | 1872 | CAAGUCACAGCUGGCCAGA | 1955 |
| rs2301367 | 1855 | CUGGCCAGCUGUGACUUGA | 204 | 1855 | CUGGCCAGCUGUGACUUGA | 204 | 1873 | UCAAGUCACAGCUGGCCAG | 1956 |
| rs2301367 | 1856 | UGGCCAGCUGUGACUUGAC | 205 | 1856 | UGGCCAGCUGUGACUUGAC | 205 | 1874 | GUCAAGUCACAGCUGGCCA | 1957 |
| rs2301367 | 1857 | GGCCAGCUGUGACUUGACA | 206 | 1857 | GGCCAGCUGUGACUUGACA | 206 | 1875 | UGUCAAGUCACAGCUGGCC | 1958 |
| rs2301367 | 1839 | GGCGGACUCAGUGGAUCUA | 207 | 1839 | GGCGGACUCAGUGGAUCUA | 207 | 1857 | UAGAUCCACUGAGUCCGCC | 1959 |
| rs2301367 | 1840 | GCGGACUCAGUGGAUCUAG | 208 | 1840 | GCGGACUCAGUGGAUCUAG | 208 | 1858 | CUAGAUCCACUGAGUCCGC | 1960 |
| rs2301367 | 1841 | CGGACUCAGUGGAUCUAGC | 209 | 1841 | CGGACUCAGUGGAUCUAGC | 209 | 1859 | GCUAGAUCCACUGAGUCCG | 1961 |
| rs2301367 | 1842 | GGACUCAGUGGAUCUAGCC | 210 | 1842 | GGACUCAGUGGAUCUAGCC | 210 | 1860 | GGCUAGAUCCACUGAGUCC | 1962 |
| rs2301367 | 1843 | GACUCAGUGGAUCUAGCCA | 211 | 1843 | GACUCAGUGGAUCUAGCCA | 211 | 1861 | UGGCUAGAUCCACUGAGUC | 1963 |
| rs2301367 | 1844 | ACUCAGUGGAUCUAGCCAG | 212 | 1844 | ACUCAGUGGAUCUAGCCAG | 212 | 1862 | CUGGCUAGAUCCACUGAGU | 1964 |
| rs2301367 | 1845 | CUCAGUGGAUCUAGCCAGC | 213 | 1845 | CUCAGUGGAUCUAGCCAGC | 213 | 1863 | GCUGGCUAGAUCCACUGAG | 1965 |
| rs2301367 | 1846 | UCAGUGGAUCUAGCCAGCU | 214 | 1846 | UCAGUGGAUCUAGCCAGCU | 214 | 1864 | AGCUGGCUAGAUCCACUGA | 1966 |
| rs2301367 | 1847 | CAGUGGAUCUAGCCAGCUG | 215 | 1847 | CAGUGGAUCUAGCCAGCUG | 215 | 1865 | CAGCUGGCUAGAUCCACUG | 1967 |
| rs2301367 | 1848 | AGUGGAUCUAGCCAGCUGU | 216 | 1848 | AGUGGAUCUAGCCAGCUGU | 216 | 1866 | ACAGCUGGCUAGAUCCACU | 1968 |
| rs2301367 | 1849 | GUGGAUCUAGCCAGCUGUG | 217 | 1849 | GUGGAUCUAGCCAGCUGUG | 217 | 1867 | CACAGCUGGCUAGAUCCAC | 1969 |
| rs2301367 | 1850 | UGGAUCUAGCCAGCUGUGA | 218 | 1850 | UGGAUCUAGCCAGCUGUGA | 218 | 1868 | UCACAGCUGGCUAGAUCCA | 1970 |
| rs2301367 | 1851 | GGAUCUAGCCAGCUGUGAC | 219 | 1851 | GGAUCUAGCCAGCUGUGAC | 219 | 1869 | GUCACAGCUGGCUAGAUCC | 1971 |
| rs2301367 | 1852 | GAUCUAGCCAGCUGUGACU | 220 | 1852 | GAUCUAGCCAGCUGUGACU | 220 | 1870 | AGUCACAGCUGGCUAGAUC | 1972 |
| rs2301367 | 1853 | AUCUAGCCAGCUGUGACUU | 221 | 1853 | AUCUAGCCAGCUGUGACUU | 221 | 1871 | AAGUCACAGCUGGCUAGAU | 1973 |
| rs2301367 | 1854 | UCUAGCCAGCUGUGACUUG | 222 | 1854 | UCUAGCCAGCUGUGACUUG | 222 | 1872 | CAAGUCACAGCUGGCUAGA | 1974 |
| rs2301367 | 1855 | CUAGCCAGCUGUGACUUGA | 223 | 1855 | CUAGCCAGCUGUGACUUGA | 223 | 1873 | UCAAGUCACAGCUGGCUAG | 1975 |
| rs2301367 | 1856 | UAGCCAGCUGUGACUUGAC | 224 | 1856 | UAGCCAGCUGUGACUUGAC | 224 | 1874 | GUCAAGUCACAGCUGGCUA | 1976 |
| rs2301367 | 1857 | AGCCAGCUGUGACUUGACA | 225 | 1857 | AGCCAGCUGUGACUUGACA | 225 | 1875 | UGUCAAGUCACAGCUGGCU | 1977 |
| rs363075 | 2980 | GCAGAAAACUUACACAGAG | 226 | 2980 | GCAGAAAACUUACACAGAG | 226 | 2998 | CUCUGUGUAAGUUUUCUGC | 1978 |
| rs363075 | 2981 | CAGAAAACUUACACAGAGG | 227 | 2981 | CAGAAAACUUACACAGAGG | 227 | 2999 | CCUCUGUGUAAGUUUUCUG | 1979 |
| rs363075 | 2982 | AGAAAACUUACACAGAGGG | 228 | 2982 | AGAAAACUUACACAGAGGG | 228 | 3000 | CCCUCUGUGUAAGUUUUCU | 1980 |
| rs363075 | 2983 | GAAAACUUACACAGAGGGG | 229 | 2983 | GAAAACUUACACAGAGGGG | 229 | 3001 | CCCCUCUGUGUAAGUUUUC | 1981 |
| rs363075 | 2984 | AAAACUUACACAGAGGGGC | 230 | 2984 | AAAACUUACACAGAGGGGC | 230 | 3002 | GCCCCUCUGUGUAAGUUUU | 1982 |
| rs363075 | 2985 | AAACUUACACAGAGGGGCU | 231 | 2985 | AAACUUACACAGAGGGGCU | 231 | 3003 | AGCCCCUCUGUGUAAGUUU | 1983 |
| rs363075 | 2986 | AACUUACACAGAGGGGCUC | 232 | 2986 | AACUUACACAGAGGGGCUC | 232 | 3004 | GAGCCCCUCUGUGUAAGUU | 1984 |
| rs363075 | 2987 | ACUUACACAGAGGGGCUCA | 233 | 2987 | ACUUACACAGAGGGGCUCA | 233 | 3005 | UGAGCCCCUCUGUGUAAGU | 1985 |
| rs363075 | 2988 | CUUACACAGAGGGGCUCAU | 234 | 2988 | CUUACACAGAGGGGCUCAU | 234 | 3006 | AUGAGCCCCUCUGUGUAAG | 1986 |
| rs363075 | 2989 | UUACACAGAGGGGCUCAUC | 235 | 2989 | UUACACAGAGGGGCUCAUC | 235 | 3007 | GAUGAGCCCCUCUGUGUAA | 1987 |
| rs363075 | 2990 | UACACAGAGGGGCUCAUCA | 236 | 2990 | UACACAGAGGGGCUCAUCA | 236 | 3008 | UGAUGAGCCCCUCUGUGUA | 1988 |
| rs363075 | 2991 | ACACAGAGGGGCUCAUCAU | 237 | 2991 | ACACAGAGGGGCUCAUCAU | 237 | 3009 | AUGAUGAGCCCCUCUGUGU | 1989 |
| rs363075 | 2992 | CACAGAGGGGCUCAUCAUU | 238 | 2992 | CACAGAGGGGCUCAUCAUU | 238 | 3010 | AAUGAUGAGCCCCUCUGUG | 1990 |
| rs363075 | 2993 | ACAGAGGGGCUCAUCAUUA | 239 | 2993 | ACAGAGGGGCUCAUCAUUA | 239 | 3011 | UAAUGAUGAGCCCCUCUGU | 1991 |
| rs363075 | 2994 | CAGAGGGGCUCAUCAUUAU | 240 | 2994 | CAGAGGGGCUCAUCAUUAU | 240 | 3012 | AUAAUGAUGAGCCCCUCUG | 1992 |
| rs363075 | 2995 | AGAGGGGCUCAUCAUUAUA | 241 | 2995 | AGAGGGGCUCAUCAUUAUA | 241 | 3013 | UAUAAUGAUGAGCCCCUCU | 1993 |
| rs363075 | 2996 | GAGGGGCUCAUCAUUAUAC | 242 | 2996 | GAGGGGCUCAUCAUUAUAC | 242 | 3014 | GUAUAAUGAUGAGCCCCUC | 1994 |
| rs363075 | 2997 | AGGGGCUCAUCAUUAUACA | 243 | 2997 | AGGGGCUCAUCAUUAUACA | 243 | 3015 | UGUAUAAUGAUGAGCCCCU | 1995 |
| rs363075 | 2998 | GGGGCUCAUCAUUAUACAG | 244 | 2998 | GGGGCUCAUCAUUAUACAG | 244 | 3016 | CUGUAUAAUGAUGAGCCCC | 1996 |
| rs363075 | 2980 | GCAGAAAACUUACACAGAA | 245 | 2980 | GCAGAAAACUUACACAGAA | 245 | 2998 | UUCUGUGUAAGUUUUCUGC | 1997 |
| rs363075 | 2981 | CAGAAAACUUACACAGAAG | 246 | 2981 | CAGAAAACUUACACAGAAG | 246 | 2999 | CUUCUGUGUAAGUUUUCUG | 1998 |
| rs363075 | 2982 | AGAAAACUUACACAGAAGG | 247 | 2982 | AGAAAACUUACACAGAAGG | 247 | 3000 | CCUUCUGUGUAAGUUUUCU | 1999 |
| rs363075 | 2983 | GAAAACUUACACAGAAGGG | 248 | 2983 | GAAAACUUACACAGAAGGG | 248 | 3001 | CCCUUCUGUGUAAGUUUUC | 2000 |
| rs363075 | 2984 | AAAACUUACACAGAAGGGC | 249 | 2984 | AAAACUUACACAGAAGGGC | 249 | 3002 | GCCCUUCUGUGUAAGUUUU | 2001 |
| rs363075 | 2985 | AAACUUACACAGAAGGGCU | 250 | 2985 | AAACUUACACAGAAGGGCU | 250 | 3003 | AGCCCUUCUGUGUAAGUUU | 2002 |
| rs363075 | 2986 | AACUUACACAGAAGGGCUC | 251 | 2986 | AACUUACACAGAAGGGCUC | 251 | 3004 | GAGCCCUUCUGUGUAAGUU | 2003 |
| rs363075 | 2987 | ACUUACACAGAAGGGCUCA | 252 | 2987 | ACUUACACAGAAGGGCUCA | 252 | 3005 | UGAGCCCUUCUGUGUAAGU | 2004 |
| rs363075 | 2988 | CUUACACAGAAGGGCUCAU | 253 | 2988 | CUUACACAGAAGGGCUCAU | 253 | 3006 | AUGAGCCCUUCUGUGUAAG | 2005 |
| rs363075 | 2989 | UUACACAGAAGGGCUCAUC | 254 | 2989 | UUACACAGAAGGGCUCAUC | 254 | 3007 | GAUGAGCCCUUCUGUGUAA | 2006 |
| rs363075 | 2990 | UACACAGAAGGGCUCAUCA | 255 | 2990 | UACACAGAAGGGCUCAUCA | 255 | 3008 | UGAUGAGCCCUUCUGUGUA | 2007 |
| rs363075 | 2991 | ACACAGAAGGGCUCAUCAU | 256 | 2991 | ACACAGAAGGGCUCAUCAU | 256 | 3009 | AUGAUGAGCCCUUCUGUGU | 2008 |
| rs363075 | 2992 | CACAGAAGGGCUCAUCAUU | 257 | 2992 | CACAGAAGGGCUCAUCAUU | 257 | 3010 | AAUGAUGAGCCCUUCUGUG | 2009 |
| rs363075 | 2993 | ACAGAAGGGCUCAUCAUUA | 258 | 2993 | ACAGAAGGGCUCAUCAUUA | 258 | 3011 | UAAUGAUGAGCCCUUCUGU | 2010 |
| rs363075 | 2994 | CAGAAGGGCUCAUCAUUAU | 259 | 2994 | CAGAAGGGCUCAUCAUUAU | 259 | 3012 | AUAAUGAUGAGCCCUUCUG | 2011 |
| rs363075 | 2995 | AGAAGGGCUCAUCAUUAUA | 260 | 2995 | AGAAGGGCUCAUCAUUAUA | 260 | 3013 | UAUAAUGAUGAGCCCUUCU | 2012 |
| rs363075 | 2996 | GAAGGGCUCAUCAUUAUAC | 261 | 2996 | GAAGGGCUCAUCAUUAUAC | 261 | 3014 | GUAUAAUGAUGAGCCCUUC | 2013 |
| rs363075 | 2997 | AAGGGCUCAUCAUUAUACA | 262 | 2997 | AAGGGCUCAUCAUUAUACA | 262 | 3015 | UGUAUAAUGAUGAGCCCUU | 2014 |
| rs363075 | 2998 | AGGGCUCAUCAUUAUACAG | 263 | 2998 | AGGGCUCAUCAUUAUACAG | 263 | 3016 | CUGUAUAAUGAUGAGCCCU | 2015 |
| rs1065746 | 3547 | UCAGCUUGGUUCCCAUUGG | 264 | 3547 | UCAGCUUGGUUCCCAUUGG | 264 | 3565 | CCAAUGGGAACCAAGCUGA | 2016 |
| rs1065746 | 3548 | CAGCUUGGUUCCCAUUGGA | 265 | 3548 | CAGCUUGGUUCCCAUUGGA | 265 | 3566 | UCCAAUGGGAACCAAGCUG | 2017 |
| rs1065746 | 3549 | AGCUUGGUUCCCAUUGGAU | 266 | 3549 | AGCUUGGUUCCCAUUGGAU | 266 | 3567 | AUCCAAUGGGAACCAAGCU | 2018 |
| rs1065746 | 3550 | GCUUGGUUCCCAUUGGAUC | 267 | 3550 | GCUUGGUUCCCAUUGGAUC | 267 | 3568 | GAUCCAAUGGGAACCAAGC | 2019 |
| rs1065746 | 3551 | CUUGGUUCCCAUUGGAUCU | 268 | 3551 | CUUGGUUCCCAUUGGAUCU | 268 | 3569 | AGAUCCAAUGGGAACCAAG | 2020 |
| rs1065746 | 3552 | UUGGUUCCCAUUGGAUCUC | 269 | 3552 | UUGGUUCCCAUUGGAUCUC | 269 | 3570 | GAGAUCCAAUGGGAACCAA | 2021 |
| rs1065746 | 3553 | UGGUUCCCAUUGGAUCUCU | 270 | 3553 | UGGUUCCCAUUGGAUCUCU | 270 | 3571 | AGAGAUCCAAUGGGAACCA | 2022 |
| rs1065746 | 3554 | GGUUCCCAUUGGAUCUCUC | 271 | 3554 | GGUUCCCAUUGGAUCUCUC | 271 | 3572 | GAGAGAUCCAAUGGGAACC | 2023 |
| rs1065746 | 3555 | GUUCCCAUUGGAUCUCUCA | 272 | 3555 | GUUCCCAUUGGAUCUCUCA | 272 | 3573 | UGAGAGAUCCAAUGGGAAC | 2024 |
| rs1065746 | 3556 | UUCCCAUUGGAUCUCUCAG | 273 | 3556 | UUCCCAUUGGAUCUCUCAG | 273 | 3574 | CUGAGAGAUCCAAUGGGAA | 2025 |
| rs1065746 | 3557 | UCCCAUUGGAUCUCUCAGC | 274 | 3557 | UCCCAUUGGAUCUCUCAGC | 274 | 3575 | GCUGAGAGAUCCAAUGGGA | 2026 |
| rs1065746 | 3558 | CCCAUUGGAUCUCUCAGCC | 275 | 3558 | CCCAUUGGAUCUCUCAGCC | 275 | 3576 | GGCUGAGAGAUCCAAUGGG | 2027 |
| rs1065746 | 3559 | CCAUUGGAUCUCUCAGCCC | 276 | 3559 | CCAUUGGAUCUCUCAGCCC | 276 | 3577 | GGGCUGAGAGAUCCAAUGG | 2028 |
| rs1065746 | 3560 | CAUUGGAUCUCUCAGCCCA | 277 | 3560 | CAUUGGAUCUCUCAGCCCA | 277 | 3578 | UGGGCUGAGAGAUCCAAUG | 2029 |
| rs1065746 | 3561 | AUUGGAUCUCUCAGCCCAU | 278 | 3561 | AUUGGAUCUCUCAGCCCAU | 278 | 3579 | AUGGGCUGAGAGAUCCAAU | 2030 |
| rs1065746 | 3562 | UUGGAUCUCUCAGCCCAUC | 279 | 3562 | UUGGAUCUCUCAGCCCAUC | 279 | 3580 | GAUGGGCUGAGAGAUCCAA | 2031 |
| rs1065746 | 3563 | UGGAUCUCUCAGCCCAUCA | 280 | 3563 | UGGAUCUCUCAGCCCAUCA | 280 | 3581 | UGAUGGGCUGAGAGAUCCA | 2032 |
| rs1065746 | 3564 | GGAUCUCUCAGCCCAUCAA | 281 | 3564 | GGAUCUCUCAGCCCAUCAA | 281 | 3582 | UUGAUGGGCUGAGAGAUCC | 2033 |
| rs1065746 | 3565 | GAUCUCUCAGCCCAUCAAG | 282 | 3565 | GAUCUCUCAGCCCAUCAAG | 282 | 3583 | CUUGAUGGGCUGAGAGAUC | 2034 |
| rs1065746 | 3547 | UCAGCUUGGUUCCCAUUGA | 283 | 3547 | UCAGCUUGGUUCCCAUUGA | 283 | 3565 | UCAAUGGGAACCAAGCUGA | 2035 |
| rs1065746 | 3548 | CAGCUUGGUUCCCAUUGAA | 284 | 3548 | CAGCUUGGUUCCCAUUGAA | 284 | 3566 | UUCAAUGGGAACCAAGCUG | 2036 |
| rs1065746 | 3549 | AGCUUGGUUCCCAUUGAAU | 285 | 3549 | AGCUUGGUUCCCAUUGAAU | 285 | 3567 | AUUCAAUGGGAACCAAGCU | 2037 |
| rs1065746 | 3550 | GCUUGGUUCCCAUUGAAUC | 286 | 3550 | GCUUGGUUCCCAUUGAAUC | 286 | 3568 | GAUUCAAUGGGAACCAAGC | 2038 |
| rs1065746 | 3551 | CUUGGUUCCCAUUGAAUCU | 287 | 3551 | CUUGGUUCCCAUUGAAUCU | 287 | 3569 | AGAUUCAAUGGGAACCAAG | 2039 |
| rs1065746 | 3552 | UUGGUUCCCAUUGAAUCUC | 288 | 3552 | UUGGUUCCCAUUGAAUCUC | 288 | 3570 | GAGAUUCAAUGGGAACCAA | 2040 |
| rs1065746 | 3553 | UGGUUCCCAUUGAAUCUCU | 289 | 3553 | UGGUUCCCAUUGAAUCUCU | 289 | 3571 | AGAGAUUCAAUGGGAACCA | 2041 |
| rs1065746 | 3554 | GGUUCCCAUUGAAUCUCUC | 290 | 3554 | GGUUCCCAUUGAAUCUCUC | 290 | 3572 | GAGAGAUUCAAUGGGAACC | 2042 |
| rs1065746 | 3555 | GUUCCCAUUGAAUCUCUCA | 291 | 3555 | GUUCCCAUUGAAUCUCUCA | 291 | 3573 | UGAGAGAUUCAAUGGGAAC | 2043 |
| rs1065746 | 3556 | UUCCCAUUGAAUCUCUCAG | 292 | 3556 | UUCCCAUUGAAUCUCUCAG | 292 | 3574 | CUGAGAGAUUCAAUGGGAA | 2044 |
| rs1065746 | 3557 | UCCCAUUGAAUCUCUCAGC | 293 | 3557 | UCCCAUUGAAUCUCUCAGC | 293 | 3575 | GCUGAGAGAUUCAAUGGGA | 2045 |
| rs1065746 | 3558 | CCCAUUGAAUCUCUCAGCC | 294 | 3558 | CCCAUUGAAUCUCUCAGCC | 294 | 3576 | GGCUGAGAGAUUCAAUGGG | 2046 |
| rs1065746 | 3559 | CCAUUGAAUCUCUCAGCCC | 295 | 3559 | CCAUUGAAUCUCUCAGCCC | 295 | 3577 | GGGCUGAGAGAUUCAAUGG | 2047 |
| rs1065746 | 3560 | CAUUGAAUCUCUCAGCCCA | 296 | 3560 | CAUUGAAUCUCUCAGCCCA | 296 | 3578 | UGGGCUGAGAGAUUCAAUG | 2048 |
| rs1065746 | 3561 | AUUGAAUCUCUCAGCCCAU | 297 | 3561 | AUUGAAUCUCUCAGCCCAU | 297 | 3579 | AUGGGCUGAGAGAUUCAAU | 2049 |
| rs1065746 | 3562 | UUGAAUCUCUCAGCCCAUC | 298 | 3562 | UUGAAUCUCUCAGCCCAUC | 298 | 3580 | GAUGGGCUGAGAGAUUCAA | 2050 |
| rs1065746 | 3563 | UGAAUCUCUCAGCCCAUCA | 299 | 3563 | UGAAUCUCUCAGCCCAUCA | 299 | 3581 | UGAUGGGCUGAGAGAUUCA | 2051 |
| rs1065746 | 3564 | GAAUCUCUCAGCCCAUCAA | 300 | 3564 | GAAUCUCUCAGCCCAUCAA | 300 | 3582 | UUGAUGGGCUGAGAGAUUC | 2052 |
| rs1065746 | 3565 | AAUCUCUCAGCCCAUCAAG | 301 | 3565 | AAUCUCUCAGCCCAUCAAG | 301 | 3583 | CUUGAUGGGCUGAGAGAUU | 2053 |
| rs1065746 | 3547 | UCAGCUUGGUUCCCAUUGC | 302 | 3547 | UCAGCUUGGUUCCCAUUGC | 302 | 3565 | GCAAUGGGAACCAAGCUGA | 2054 |
| rs1065746 | 3548 | CAGCUUGGUUCCCAUUGCA | 303 | 3548 | CAGCUUGGUUCCCAUUGCA | 303 | 3566 | UGCAAUGGGAACCAAGCUG | 2055 |
| rs1065746 | 3549 | AGCUUGGUUCCCAUUGCAU | 304 | 3549 | AGCUUGGUUCCCAUUGCAU | 304 | 3567 | AUGCAAUGGGAACCAAGCU | 2056 |
| rs1065746 | 3550 | GCUUGGUUCCCAUUGCAUC | 305 | 3550 | GCUUGGUUCCCAUUGCAUC | 305 | 3568 | GAUGCAAUGGGAACCAAGC | 2057 |
| rs1065746 | 3551 | CUUGGUUCCCAUUGCAUCU | 306 | 3551 | CUUGGUUCCCAUUGCAUCU | 306 | 3569 | AGAUGCAAUGGGAACCAAG | 2058 |
| rs1065746 | 3552 | UUGGUUCCCAUUGCAUCUC | 307 | 3552 | UUGGUUCCCAUUGCAUCUC | 307 | 3570 | GAGAUGCAAUGGGAACCAA | 2059 |
| rs1065746 | 3553 | UGGUUCCCAUUGCAUCUCU | 308 | 3553 | UGGUUCCCAUUGCAUCUCU | 308 | 3571 | AGAGAUGCAAUGGGAACCA | 2060 |
| rs1065746 | 3554 | GGUUCCCAUUGCAUCUCUC | 309 | 3554 | GGUUCCCAUUGCAUCUCUC | 309 | 3572 | GAGAGAUGCAAUGGGAACC | 2061 |
| rs1065746 | 3555 | GUUCCCAUUGCAUCUCUCA | 310 | 3555 | GUUCCCAUUGCAUCUCUCA | 310 | 3573 | UGAGAGAUGCAAUGGGAAC | 2062 |
| rs1065746 | 3556 | UUCCCAUUGCAUCUCUCAG | 311 | 3556 | UUCCCAUUGCAUCUCUCAG | 311 | 3574 | CUGAGAGAUGCAAUGGGAA | 2063 |
| rs1065746 | 3557 | UCCCAUUGCAUCUCUCAGC | 312 | 3557 | UCCCAUUGCAUCUCUCAGC | 312 | 3575 | GCUGAGAGAUGCAAUGGGA | 2064 |
| rs1065746 | 3558 | CCCAUUGGAUCUCUCAGCC | 313 | 3558 | CCCAUUGCAUCUCUCAGCC | 313 | 3576 | GGCUGAGAGAUGCAAUGGG | 2065 |
| rs1065746 | 3559 | CCAUUGCAUCUCUCAGCCC | 314 | 3559 | CCAUUGCAUCUCUCAGCCC | 314 | 3577 | GGGCUGAGAGAUGCAAUGG | 2066 |
| rs1065746 | 3560 | CAUUGCAUCUCUCAGCCCA | 315 | 3560 | CAUUGCAUCUCUCAGCCCA | 315 | 3578 | UGGGCUGAGAGAUGCAAUG | 2067 |
| rs1065746 | 3561 | AUUGCAUCUCUCAGCCCAU | 316 | 3561 | AUUGCAUCUCUCAGCCCAU | 316 | 3579 | AUGGGCUGAGAGAUGCAAU | 2068 |
| rs1065746 | 3562 | UUGCAUCUCUCAGCCCAUC | 317 | 3562 | UUGCAUCUCUCAGCCCAUC | 317 | 3580 | GAUGGGCUGAGAGAUGCAA | 2069 |
| rs1065746 | 3563 | UGCAUCUCUCAGCCCAUCA | 318 | 3563 | UGCAUCUCUCAGCCCAUCA | 318 | 3581 | UGAUGGGCUGAGAGAUGCA | 2070 |
| rs1065746 | 3564 | GCAUCUCUCAGCCCAUCAA | 319 | 3564 | GCAUCUCUCAGCCCAUCAA | 319 | 3582 | UUGAUGGGCUGAGAGAUGC | 2071 |
| rs1065746 | 3565 | CAUCUCUCAGCCCAUCAAG | 320 | 3565 | CAUCUCUCAGCCCAUCAAG | 320 | 3583 | CUUGAUGGGCUGAGAGAUG | 2072 |
| rs1065747 | 3647 | GGGCCUCUGAAGAAGAAGC | 321 | 3647 | GGGCCUCUGAAGAAGAAGC | 321 | 3665 | GCUUCUUCUUCAGAGGCCC | 2073 |
| rs1065747 | 3648 | GGCCUCUGAAGAAGAAGCC | 322 | 3648 | GGCCUCUGAAGAAGAAGCC | 322 | 3666 | GGCUUCUUCUUCAGAGGCC | 2074 |
| rs1065747 | 3649 | GCCUCUGAAGAAGAAGCCA | 323 | 3649 | GCCUCUGAAGAAGAAGCCA | 323 | 3667 | UGGCUUCUUCUUCAGAGGC | 2075 |
| rs1065747 | 3650 | CCUCUGAAGAAGAAGCCAA | 324 | 3650 | CCUCUGAAGAAGAAGCCAA | 324 | 3668 | UUGGCUUCUUCUUCAGAGG | 2076 |
| rs1065747 | 3651 | CUCUGAAGAAGAAGCCAAC | 325 | 3651 | CUCUGAAGAAGAAGCCAAC | 325 | 3669 | GUUGGCUUCUUCUUCAGAG | 2077 |
| rs1065747 | 3652 | UCUGAAGAAGAAGCCAACC | 326 | 3652 | UCUGAAGAAGAAGCCAACC | 326 | 3670 | GGUUGGCUUCUUCUUCAGA | 2078 |
| rs1065747 | 3653 | CUGAAGAAGAAGCCAACCC | 327 | 3653 | CUGAAGAAGAAGCCAACCC | 327 | 3671 | GGGUUGGCUUCUUCUUCAG | 2079 |
| rs1065747 | 3654 | UGAAGAAGAAGCCAACCCA | 328 | 3654 | UGAAGAAGAAGCCAACCCA | 328 | 3672 | UGGGUUGGCUUCUUCUUCA | 2080 |
| rs1065747 | 3655 | GAAGAAGAAGCCAACCCAG | 329 | 3655 | GAAGAAGAAGCCAACCCAG | 329 | 3673 | CUGGGUUGGCUUCUUCUUC | 2081 |
| rs1065747 | 3656 | AAGAAGXAGCCAACCCAGC | 330 | 3656 | AAGAAGAAGCCAACCCAGC | 330 | 3674 | GCUGGGUUGGCUUCUUCUU | 2082 |
| rs1065747 | 3657 | AGAAGAAGCCAACCCAGCA | 331 | 3657 | AGAAGAAGCCAACCCAGCA | 331 | 3675 | UGCUGGGUUGGCUUCUUCU | 2083 |
| rs1065747 | 3658 | GAAGAAGCCAACCCAGCAG | 332 | 3658 | GAAGAAGCCAACCCAGCAG | 332 | 3676 | CUGCUGGGUUGGCUUCUUC | 2084 |
| rs1065747 | 3659 | AAGAAGCCAACCCAGCAGC | 333 | 3659 | AAGAAGCCAACCCAGCAGC | 333 | 3677 | GCUGCUGGGUUGGCUUCUU | 2085 |
| rs1065747 | 3660 | AGAAGCCAACCCAGCAGCC | 334 | 3660 | AGAAGCCAACCCAGCAGCC | 334 | 3678 | GGCUGCUGGGUUGGCUUCU | 2086 |
| rs1065747 | 3661 | GAAGCCAACCCAGCAGCCA | 335 | 3661 | GAAGCCAACCCAGCAGCCA | 335 | 3679 | UGGCUGCUGGGUUGGCUUC | 2087 |
| rs1065747 | 3662 | AAGCCAACCCAGCAGCCAC | 336 | 3662 | AAGCCAACCCAGCAGCCAC | 336 | 3680 | GUGGCUGCUGGGUUGGCUU | 2088 |
| rs1065747 | 3663 | AGCCAACCCAGCAGCCACC | 337 | 3663 | AGCCAACCCAGCAGCCACC | 337 | 3681 | GGUGGCUGCUGGGUUGGCU | 2089 |
| rs1065747 | 3664 | GCCAACCCAGCAGCCACCA | 338 | 3664 | GCCAACCCAGCAGCCACCA | 338 | 3682 | UGGUGGCUGCUGGGUUGGC | 2090 |
| rs1065747 | 3665 | CCAACCCAGCAGCCACCAA | 339 | 3665 | CCAACCCAGCAGCCACCAA | 339 | 3683 | UUGGUGGCUGCUGGGUUGG | 2091 |
| rs1065747 | 3647 | GGGCCUCUGAAGAAGAAGG | 340 | 3647 | GGGCCUCUGAAGAAGAAGG | 340 | 3665 | CCUUCUUCUUCAGAGGCCC | 2092 |
| rs1065747 | 3648 | GGCCUCUGAAGAAGAAGGC | 341 | 3648 | GGCCUCUGAAGAAGAAGGC | 341 | 3666 | GCCUUCUUCUUCAGAGGCC | 2093 |
| rs1065747 | 3649 | GCCUCUGAAGAAGAAGGCA | 342 | 3649 | GCCUCUGAAGAAGAAGGCA | 342 | 3667 | UGCCUUCUUCUUCAGAGGC | 2094 |
| rs1065747 | 3650 | CCUCUGAAGAAGAAGGCAA | 343 | 3650 | CCUCUGAAGAAGAAGGCAA | 343 | 3668 | UUGCCUUCUUCUUCAGAGG | 2095 |
| rs1065747 | 3651 | CUCUGAAGAAGAAGGCAAC | 344 | 3651 | CUCUGAAGAAGAAGGCAAC | 344 | 3669 | GUUGCCUUCUUCUUCAGAG | 2096 |
| rs1065747 | 3652 | UCUGAAGAAGAAGGCAACC | 345 | 3652 | UCUGAAGAAGAAGGCAACC | 345 | 3670 | GGUUGCCUUCUUCUUCAGA | 2097 |
| rs1065747 | 3653 | CUGAAGAAGAAGGCAACCC | 346 | 3653 | CUGAAGAAGAAGGCAACCC | 346 | 3671 | GGGUUGCCUUCUUCUUCAG | 2098 |
| rs1065747 | 3654 | UGAAGAAGAAGGCAACCCA | 347 | 3654 | UGAAGAAGAAGGCAACCCA | 347 | 3672 | UGGGUUGCCUUCUUCUUCA | 2099 |
| rs1065747 | 3655 | GAAGAAGAAGGCAACCCAG | 348 | 3655 | GAAGAAGAAGGCAACCCAG | 348 | 3673 | CUGGGUUGCCUUCUUCUUC | 2100 |
| rs1065747 | 3656 | AAGAAGAAGGCAACCCAGC | 349 | 3656 | AAGAAGAAGGCAACCCAGC | 349 | 3674 | GCUGGGUUGCCUUCUUCUU | 2101 |
| rs1065747 | 3657 | AGAAGAAGGCAACCCAGCA | 350 | 3657 | AGAAGAAGGCAACCCAGCA | 350 | 3675 | UGCUGGGUUGCCUUCUUCU | 2102 |
| rs1065747 | 3658 | GAAGAAGGCAACCCAGCAG | 351 | 3658 | GAAGAAGGCAACCCAGCAG | 351 | 3676 | CUGCUGGGUUGCCUUCUUC | 2103 |
| rs1065747 | 3659 | AAGAAGGCAACCCAGCAGC | 352 | 3659 | AAGAAGGCAACCCAGCAGC | 352 | 3677 | GCUGCUGGGUUGCCUUCUU | 2104 |
| rs1065747 | 3660 | AGAAGGCAACCCAGCAGCC | 353 | 3660 | AGAAGGCAACCCAGCAGCC | 353 | 3678 | GGCUGCUGGGUUGCCUUCU | 2105 |
| rs1065747 | 3661 | GAAGGCAACCCAGCAGCCA | 354 | 3661 | GAAGGCAACCCAGCAGCCA | 354 | 3679 | UGGCUGCUGGGUUGCCUUC | 2106 |
| rs1065747 | 3662 | AAGGCAACCCAGCAGCCAC | 355 | 3662 | AAGGCAACCCAGCAGCCAC | 355 | 3680 | GUGGCUGCUGGGUUGCCUU | 2107 |
| rs1065747 | 3663 | AGGCAACCCAGCAGCCACC | 356 | 3663 | AGGCAACCCAGCAGCCACC | 356 | 3681 | GGUGGCUGCUGGGUUGCCU | 2108 |
| rs1065747 | 3664 | GGCAACCCAGCAGCCACCA | 357 | 3664 | GGCAACCCAGCAGCCACCA | 357 | 3682 | UGGUGGCUGCUGGGUUGCC | 2109 |
| rs1065747 | 3665 | GCAACCCAGCAGCCACCAA | 358 | 3665 | GCAACCCAGCAGCCACCAA | 358 | 3683 | UUGGUGGCUGCUGGGUUGC | 2110 |
| rs2530588 | 3803 | CUGGACCCGCAAUAAAGGC | 359 | 3803 | CUGGACCCGCAAUAAAGGC | 359 | 3821 | GCCUUUAUUGCGGGUCCAG | 2111 |
| rs2530588 | 3804 | UGGACCCGCAAUAAAGGCA | 360 | 3804 | UGGACCCGCAAUAAAGGCA | 360 | 3822 | UGCCUUUAUUGCGGGUCCA | 2112 |
| rs2530588 | 3805 | GGACCCGCAAUAAAGGCAG | 361 | 3805 | GGACCCGCAAUAAAGGCAG | 361 | 3823 | CUGCCUUUAUUGCGGGUCC | 2113 |
| rs2530588 | 3806 | GACCCGCAAUAAAGGCAGC | 362 | 3806 | GACCCGCAAUAAAGGCAGC | 362 | 3824 | GCUGCCUUUAUUGCGGGUC | 2114 |
| rs2530588 | 3807 | ACCCGCAAUAAAGGCAGCC | 363 | 3807 | ACCCGCAAUAAAGGCAGCC | 363 | 3825 | GGCUGCCUUUAUUGCGGGU | 2115 |
| rs2530588 | 3808 | CCCGCAAUAAAGGCAGCCU | 364 | 3808 | CCCGCAAUAAAGGCAGCCU | 364 | 3826 | AGGCUGCCUUUAUUGCGGG | 2116 |
| rs2530588 | 3809 | CCGCAAUAAAGGCAGCCUU | 365 | 3809 | CCGCAAUAAAGGCAGCCUU | 365 | 3827 | AAGGCUGCCUUUAUUGCGG | 2117 |
| rs2530588 | 3810 | CGCAAUAAAGGCAGCCUUG | 366 | 3810 | CGCAAUAAAGGCAGCCUUG | 366 | 3828 | CAAGGCUGCCUUUAUUGCG | 2118 |
| rs2530588 | 3811 | GCAAUAAAGGCAGCCUUGC | 367 | 3811 | GCAAUAAAGGCAGCCUUGC | 367 | 3829 | GCAAGGCUGCCUUUAUUGC | 2119 |
| rs2530588 | 3812 | CAAUAAAGGCAGCCUUGCC | 368 | 3812 | CAAUAAAGGCAGCCUUGCC | 368 | 3830 | GGCAAGGCUGCCUUUAUUG | 2120 |
| rs2530588 | 3813 | AAUAAAGGCAGCCUUGCCU | 369 | 3813 | AAUAAAGGCAGCCUUGCCU | 369 | 3831 | AGGCAAGGCUGCCUUUAUU | 2121 |
| rs2530588 | 3814 | AUAAAGGCAGCCUUGCCUU | 370 | 3814 | AUAAAGGCAGCCUUGCCUU | 370 | 3832 | AAGGCAAGGCUGCCUUUAU | 2122 |
| rs2530588 | 3815 | UAAAGGCAGCCUUGCCUUC | 371 | 3815 | UAAAGGCAGCCUUGCCUUC | 371 | 3833 | GAAGGCAAGGCUGCCUUUA | 2123 |
| rs2530588 | 3816 | AAAGGCAGCCUUGCCUUCU | 372 | 3816 | AAAGGCAGCCUUGCCUUCU | 372 | 3834 | AGAAGGCAAGGCUGCCUUU | 2124 |
| rs2530588 | 3817 | AAGGCAGCCUUGCCUUCUC | 373 | 3817 | AAGGCAGCCUUGCCUUCUC | 373 | 3835 | GAGAAGGCAAGGCUGCCUU | 2125 |
| rs2530588 | 3818 | AGGCAGCCUUGCCUUCUCU | 374 | 3818 | AGGCAGCCUUGCCUUCUCU | 374 | 3836 | AGAGAAGGCAAGGCUGCCU | 2126 |
| rs2530588 | 3819 | GGCAGCCUUGCCUUCUCUA | 375 | 3819 | GGCAGCCUUGCCUUCUCUA | 375 | 3837 | UAGAGAAGGCAAGGCUGCC | 2127 |
| rs2530588 | 3820 | GCAGCCUUGCCUUCUCUAA | 376 | 3820 | GCAGCCUUGCCUUCUCUAA | 376 | 3838 | UUAGAGAAGGCAAGGCUGC | 2128 |
| rs2530588 | 3821 | CAGCCUUGCCUUCUCUAAC | 377 | 3821 | CAGCCUUGCCUUCUCUAAC | 377 | 3839 | GUUAGAGAAGGCAAGGCUG | 2129 |
| rs2530588 | 3803 | CUGGACCCGCAAUAAAGGA | 378 | 3803 | CUGGACCCGCAAUAAAGGA | 378 | 3821 | UCCUUUAUUGCGGGUCCAG | 2130 |
| rs2530588 | 3804 | UGGACCCGCAAUAAAGGAA | 379 | 3804 | UGGACCCGCAAUAAAGGAA | 379 | 3822 | UUCCUUUAUUGCGGGUCCA | 2131 |
| rs2530588 | 3805 | GGACCCGCAAUAAAGGAAG | 380 | 3805 | GGACCCGCAAUAAAGGAAG | 380 | 3823 | CUUCCUUUAUUGCGGGUCC | 2132 |
| rs2530588 | 3806 | GACCCGCAAUAAAGGAAGC | 381 | 3806 | GACCCGCAAUAAAGGAAGC | 381 | 3824 | GCUUCCUUUAUUGCGGGUC | 2133 |
| rs2530588 | 3807 | ACCCGCAAUAAAGGAAGCC | 382 | 3807 | ACCCGCAAUAAAGGAAGCC | 382 | 3825 | GGCUUCCUUUAUUGCGGGU | 2134 |
| rs2530588 | 3808 | CCCGCAAUAAAGGAAGCCU | 383 | 3808 | CCCGCAAUAAAGGAAGCCU | 383 | 3826 | AGGCUUCCUUUAUUGCGGG | 2135 |
| rs2530588 | 3809 | CCGCAAUAAAGGAAGCCUU | 384 | 3809 | CCGCAAUAAAGGAAGCCUU | 384 | 3827 | AAGGCUUCCUUUAUUGCGG | 2136 |
| rs2530588 | 3810 | CGCAAUAAAGGAAGCCUUG | 385 | 3810 | CGCAAUAAAGGAAGCCUUG | 385 | 3828 | CAAGGCUUCCUUUAUUGCG | 2137 |
| rs2530588 | 3811 | GCAAUAAAGGAAGCCUUGC | 386 | 3811 | GCAAUAAAGGAAGCCUUGC | 386 | 3829 | GCAAGGCUUCCUUUAUUGC | 2138 |
| rs2530588 | 3812 | CAAUAAAGGAAGCCUUGCC | 387 | 3812 | CAAUAAAGGAAGCCUUGCC | 387 | 3830 | GGCAAGGCUUCCUUUAUUG | 2139 |
| rs2530588 | 3813 | AAUAAAGGAAGCCUUGCCU | 388 | 3813 | AAUAAAGGAAGCCUUGCCU | 388 | 3831 | AGGCAAGGCUUCCUUUAUU | 2140 |
| rs2530588 | 3814 | AUAAAGGAAGCCUUGCCUU | 389 | 3814 | AUAAAGGAAGCCUUGCCUU | 389 | 3832 | AAGGCAAGGCUUCCUUUAU | 2141 |
| rs2530588 | 3815 | UAAAGGAAGCCUUGCCUUC | 390 | 3815 | UAAAGGAAGCCUUGCCUUC | 390 | 3833 | GAAGGCAAGGCUUCCUUUA | 2142 |
| rs2530588 | 3816 | AAAGGAAGCCUUGCCUUCU | 391 | 3816 | AAAGGAAGCCUUGCCUUCU | 391 | 3834 | AGAAGGCAAGGCUUCCUUU | 2143 |
| rs2530588 | 3817 | AAGGAAGCCUUGCCUUCUC | 392 | 3817 | AAGGAAGCCUUGCCUUCUC | 392 | 3835 | GAGAAGGCAAGGCUUCCUU | 2144 |
| rs2530588 | 3818 | AGGAAGCCUUGCCUUCUCU | 393 | 3818 | AGGAAGCCUUGCCUUCUCU | 393 | 3836 | AGAGAAGGCAAGGCUUCCU | 2145 |
| rs2530588 | 3819 | GGAAGCCUUGCCUUCUCUA | 394 | 3819 | GGAAGCCUUGCCUUCUCUA | 394 | 3837 | UAGAGAAGGCAAGGCUUCC | 2146 |
| rs2530588 | 3820 | GAAGCCUUGCCUUCUCUAA | 395 | 3820 | GAAGCCUUGCCUUCUCUAA | 395 | 3838 | UUAGAGAAGGCAAGGCUUC | 2147 |
| rs2530588 | 3821 | AAGCCUUGCCUUCUCUAAC | 396 | 3821 | AAGCCUUGCCUUCUCUAAC | 396 | 3839 | GUUAGAGAAGGCAAGGCUU | 2148 |
| rs3025843 | 3822 | AGCCUUGCCUUCUCUAACA | 397 | 3822 | AGCCUUGCCUUCUCUAACA | 397 | 3840 | UGUUAGAGAAGGCAAGGCU | 2149 |
| rs3025843 | 3823 | GCCUUGCCUUCUCUAACAA | 398 | 3823 | GCCUUGCCUUCUCUAACAA | 398 | 3841 | UUGUUAGAGAAGGCAAGGC | 2150 |
| rs3025843 | 3824 | CCUUGCCUUCUCUAACAAA | 399 | 3824 | CCUUGCCUUCUCUAACAAA | 399 | 3842 | UUUGUUAGAGAAGGCAAGG | 2151 |
| rs3025843 | 3825 | CUUGCCUUCUCUAACAAAC | 400 | 3825 | CUUGCCUUCUCUAACAAAC | 400 | 3843 | GUUUGUUAGAGAAGGCAAG | 2152 |
| rs3025843 | 3826 | UUGCCUUCUCUAACAAACC | 401 | 3826 | UUGCCUUCUCUAACAAACC | 401 | 3844 | GGUUUGUUAGAGAAGGCAA | 2153 |
| rs3025843 | 3827 | UGCCUUCUCUAACAAACCC | 402 | 3827 | UGCCUUCUCUAACAAACCC | 402 | 3845 | GGGUUUGUUAGAGAAGGCA | 2154 |
| rs3025843 | 3828 | GCCUUCUCUAACAAACCCC | 403 | 3828 | GCCUUCUCUAACAAACCCC | 403 | 3846 | GGGGUUUGUUAGAGAAGGC | 2155 |
| rs3025843 | 3829 | CCUUCUCUAACAAACCCCC | 404 | 3829 | CCUUCUCUAACAAACCCCC | 404 | 3847 | GGGGGUUUGUUAGAGAAGG | 2156 |
| rs3025843 | 3830 | CUUCUCUAACAAACCCCCC | 405 | 3830 | CUUCUCUAACAAACCCCCC | 405 | 3848 | GGGGGGUUUGUUAGAGAAG | 2157 |
| rs3025843 | 3831 | UUCUCUAACAAACCCCCCU | 406 | 3831 | UUCUCUAACAAACCCCCCU | 406 | 3849 | AGGGGGGUUUGUUAGAGAA | 2158 |
| rs3025843 | 3832 | UCUCUAACAAACCCCCCUU | 407 | 3832 | UCUCUAACAAACCCCCCUU | 407 | 3850 | AAGGGGGGUUUGUUAGAGA | 2159 |
| rs3025843 | 3833 | CUCUAACAAACCCCCCUUC | 408 | 3833 | CUCUAACAAACCCCCCUUC | 408 | 3851 | GAAGGGGGGUUUGUUAGAG | 2160 |
| rs3025843 | 3834 | UCUAACAAACCCCCCUUCU | 409 | 3834 | UCUAACAAACCCCCCUUCU | 409 | 3852 | AGAAGGGGGGUUUGUUAGA | 2161 |
| rs3025843 | 3835 | CUAACAAACCCCCCUUCUC | 410 | 3835 | CUAACAAACCCCCCUUCUC | 410 | 3853 | GAGAAGGGGGGUUUGUUAG | 2162 |
| rs3025843 | 3836 | UAACAAACCCCCCUUCUCU | 411 | 3836 | UAACAAACCCCCCUUCUCU | 411 | 3854 | AGAGAAGGGGGGUUUGUUA | 2163 |
| rs3025843 | 3837 | AACAAACCCCCCUUCUCUA | 412 | 3837 | AACAAACCCCCCUUCUCUA | 412 | 3855 | UAGAGAAGGGGGGUUUGUU | 2164 |
| rs3025843 | 3838 | ACAAACCCCCCUUCUCUAA | 413 | 3838 | ACAAACCCCCCUUCUCUAA | 413 | 3856 | UUAGAGAAGGGGGGUUUGU | 2165 |
| rs3025843 | 3820 | GCAGCCUUGCCUUCUCUAG | 414 | 3820 | GCAGCCUUGCCUUCUCUAG | 414 | 3838 | CUAGAGAAGGCAAGGCUGC | 2166 |
| rs3025843 | 3821 | CAGCCUUGCCUUCUCUAGC | 415 | 3821 | CAGCCUUGCCUUCUCUAGC | 415 | 3839 | GCUAGAGAAGGCAAGGCUG | 2167 |
| rs3025843 | 3822 | AGCCUUGCCUUCUCUAGCA | 416 | 3822 | AGCCUUGCCUUCUCUAGCA | 416 | 3840 | UGCUAGAGAAGGCAAGGCU | 2168 |
| rs3025843 | 3823 | GCCUUGCCUUCUCUAGCAA | 417 | 3823 | GCCUUGCCUUCUCUAGCAA | 417 | 3841 | UUGCUAGAGAAGGCAAGGC | 2169 |
| rs3025843 | 3824 | CCUUGCCUUCUCUAGCAAA | 418 | 3824 | CCUUGCCUUCUCUAGCAAA | 418 | 3842 | UUUGCUAGAGAAGGCAAGG | 2170 |
| rs3025843 | 3825 | CUUGCCUUCUCUAGCAAAC | 419 | 3825 | CUUGCCUUCUCUAGCAAAC | 419 | 3843 | GUUUGCUAGAGAAGGCAAG | 2171 |
| rs3025843 | 3826 | UUGCCUUCUCUAGCAAACC | 420 | 3826 | UUGCCUUCUCUAGCAAACC | 420 | 3844 | GGUUUGCUAGAGAAGGCAA | 2172 |
| rs3025843 | 3827 | UGCCUUCUCUAGCAAACCC | 421 | 3827 | UGCCUUCUCUAGCAAACCC | 421 | 3845 | GGGUUUGCUAGAGAAGGCA | 2173 |
| rs3025843 | 3828 | GCCUUCUCUAGCAAACCCC | 422 | 3828 | GCCUUCUCUAGCAAACCCC | 422 | 3846 | GGGGUUUGCUAGAGAAGGC | 2174 |
| rs3025843 | 3829 | CCUUCUCUAGCAAACCCCC | 423 | 3829 | CCUUCUCUAGCAAACCCCC | 423 | 3847 | GGGGGUUUGCUAGAGAAGG | 2175 |
| rs3025843 | 3830 | CUUCUCUAGCAAACCCCCC | 424 | 3830 | CUUCUCUAGCAAACCCCCC | 424 | 3848 | GGGGGGUUUGCUAGAGAAG | 2176 |
| rs3025843 | 3831 | UUCUCUAGCAAACCCCCCU | 425 | 3831 | UUCUCUAGCAAACCCCCCU | 425 | 3849 | AGGGGGGUUUGCUAGAGAA | 2177 |
| rs3025843 | 3832 | UCUCUAGCAAACCCCCCUU | 426 | 3832 | UCUCUAGCAAACCCCCCUU | 426 | 3850 | AAGGGGGGUUUGCUAGAGA | 2178 |
| rs3025843 | 3833 | CUCUAGCAAACCCCCCUUC | 427 | 3833 | CUCUAGCAAACCCCCCUUC | 427 | 3851 | GAAGGGGGGUUUGCUAGAG | 2179 |
| rs3025843 | 3834 | UCUAGCAAACCCCCCUUCU | 428 | 3834 | UCUAGCAAACCCCCCUUCU | 428 | 3852 | AGAAGGGGGGUUUGCUAGA | 2180 |
| rs3025843 | 3835 | CUAGCAAACCCCCCUUCUC | 429 | 3835 | CUAGCAAACCCCCCUUCUC | 429 | 3853 | GAGAAGGGGGGUUUGCUAG | 2181 |
| rs3025843 | 3836 | UAGCAAACCCCCCUUCUCU | 430 | 3836 | UAGCAAACCCCCCUUCUCU | 430 | 3854 | AGAGAAGGGGGGUUUGCUA | 2182 |
| rs3025843 | 3837 | AGCAAACCCCCCUUCUCUA | 431 | 3837 | AGCAAACCCCCCUUCUCUA | 431 | 3855 | UAGAGAAGGGGGGUUUGCU | 2183 |
| rs3025843 | 3838 | GCAAACCCCCCUUCUCUAA | 432 | 3838 | GCAAACCCCCCUUCUCUAA | 432 | 3856 | UUAGAGAAGGGGGGUUUGC | 2184 |
| rs4690074 | 4104 | AAAGUUUGGAGGGUUUCUC | 433 | 4104 | AAAGUUUGGAGGGUUUCUC | 433 | 4122 | GAGAAACCCUCCAAACUUU | 2185 |
| rs4690074 | 4105 | AAGUUUGGAGGGUUUCUCC | 434 | 4105 | AAGUUUGGAGGGUUUCUCC | 434 | 4123 | GGAGAAACCCUCCAAACUU | 2186 |
| rs4690074 | 4106 | AGUUUGGAGGGUUUCUCCG | 435 | 4106 | AGUUUGGAGGGUUUCUCCG | 435 | 4124 | CGGAGAAACCCUCCAAACU | 2187 |
| rs4690074 | 4107 | GUUUGGAGGGUUUCUCCGC | 436 | 4107 | GUUUGGAGGGUUUCUCCGC | 436 | 4125 | GCGGAGAAACCCUCCAAAC | 2188 |
| rs4690074 | 4108 | UUUGGAGGGUUUCUCCGCU | 437 | 4108 | UUUGGAGGGUUUCUCCGCU | 437 | 4126 | AGCGGAGAAACCCUCCAAA | 2189 |
| rs4690074 | 4109 | UUGGAGGGUUUCUCCGCUC | 438 | 4109 | UUGGAGGGUUUCUCCGCUC | 438 | 4127 | GAGCGGAGAAACCCUCCAA | 2190 |
| rs4690074 | 4110 | UGGAGGGUUUCUCCGCUCA | 439 | 4110 | UGGAGGGUUUCUCCGCUCA | 439 | 4128 | UGAGCGGAGAAACCCUCCA | 2191 |
| rs4690074 | 4111 | GGAGGGUUUCUCCGCUCAG | 440 | 4111 | GGAGGGUUUCUCCGCUCAG | 440 | 4129 | CUGAGCGGAGAAACCCUCC | 2192 |
| rs4690074 | 4112 | GAGGGUUUCUCCGCUCAGC | 441 | 4112 | GAGGGUUUCUCCGCUCAGC | 441 | 4130 | GCUGAGCGGAGAAACCCUC | 2193 |
| rs4690074 | 4113 | AGGGUUUCUCCGCUCAGCC | 442 | 4113 | AGGGUUUCUCCGCUCAGCC | 442 | 4131 | GGCUGAGCGGAGAAACCCU | 2194 |
| rs4690074 | 4114 | GGGUUUCUCCGCUCAGCCU | 443 | 4114 | GGGUUUCUCCGCUCAGCCU | 443 | 4132 | AGGCUGAGCGGAGAAACCC | 2195 |
| rs4690074 | 4115 | GGUUUCUCCGCUCAGCCUU | 444 | 4115 | GGUUUCUCCGCUCAGCCUU | 444 | 4133 | AAGGCUGAGCGGAGAAACC | 2196 |
| rs4690074 | 4116 | GUUUCUCCGCUCAGCCUUG | 445 | 4116 | GUUUCUCCGCUCAGCCUUG | 445 | 4134 | CAAGGCUGAGCGGAGAAAC | 2197 |
| rs4690074 | 4117 | UUUCUCCGCUCAGCCUUGG | 446 | 4117 | UUUCUCCGCUCAGCCUUGG | 446 | 4135 | CCAAGGCUGAGCGGAGAAA | 2198 |
| rs4690074 | 4118 | UUCUCCGCUCAGCCUUGGA | 447 | 4118 | UUCUCCGCUCAGCCUUGGA | 447 | 4136 | UCCAAGGCUGAGCGGAGAA | 2199 |
| rs4690074 | 4119 | UCUCCGCUCAGCCUUGGAU | 448 | 4119 | UCUCCGCUCAGCCUUGGAU | 448 | 4137 | AUCCAAGGCUGAGCGGAGA | 2200 |
| rs4690074 | 4120 | CUCCGCUCAGCCUUGGAUG | 449 | 4120 | CUCCGCUCAGCCUUGGAUG | 449 | 4138 | CAUCCAAGGCUGAGCGGAG | 2201 |
| rs4690074 | 4121 | UCCGCUCAGCCUUGGAUGU | 450 | 4121 | UCCGCUCAGCCUUGGAUGU | 450 | 4139 | ACAUCCAAGGCUGAGCGGA | 2202 |
| rs4690074 | 4122 | CCGCUCAGCCUUGGAUGUU | 451 | 4122 | CCGCUCAGCCUUGGAUGUU | 451 | 4140 | AACAUCCAAGGCUGAGCGG | 2203 |
| rs4690074 | 4104 | AAAGUUUGGAGGGUUUCUU | 452 | 4104 | AAAGUUUGGAGGGUUUCUU | 452 | 4122 | AAGAAACCCUCCAAACUUU | 2204 |
| rs4690074 | 4105 | AAGUUUGGAGGGUUUCUUC | 453 | 4105 | AAGUUUGGAGGGUUUCUUC | 453 | 4123 | GAAGAAACCCUCCAAACUU | 2205 |
| rs4690074 | 4106 | AGUUUGGAGGGUUUCUUCG | 454 | 4106 | AGUUUGGAGGGUUUCUUCG | 454 | 4124 | CGAAGAAACCCUCCAAACU | 2206 |
| rs4690074 | 4107 | GUUUGGAGGGUUUCUUCGC | 455 | 4107 | GUUUGGAGGGUUUCUUCGC | 455 | 4125 | GCGAAGAAACCCUCCAAAC | 2207 |
| rs4690074 | 4108 | UUUGGAGGGUUUCUUCGCU | 456 | 4108 | UUUGGAGGGUUUCUUCGCU | 456 | 4126 | AGCGAAGAAACCCUCCAAA | 2208 |
| rs4690074 | 4109 | UUGGAGGGUUUCUUCGCUC | 457 | 4109 | UUGGAGGGUUUCUUCGCUC | 457 | 4127 | GAGCGAAGAAACCCUCCAA | 2209 |
| rs4690074 | 4110 | UGGAGGGUUUCUUCGCUCA | 458 | 4110 | UGGAGGGUUUCUUCGCUCA | 458 | 4128 | UGAGCGAAGAAACCCUCCA | 2210 |
| rs4690074 | 4111 | GGAGGGUUUCUUCGCUCAG | 459 | 4111 | GGAGGGUUUCUUCGCUCAG | 459 | 4129 | CUGAGCGAAGAAACCCUCC | 2211 |
| rs4690074 | 4112 | GAGGGUUUCUUCGCUCAGC | 460 | 4112 | GAGGGUUUCUUCGCUCAGC | 460 | 4130 | GCUGAGCGAAGAAACCCUC | 2212 |
| rs4690074 | 4113 | AGGGUUUCUUCGCUCAGCC | 461 | 4113 | AGGGUUUCUUCGCUCAGCC | 461 | 4131 | GGCUGAGCGAAGAAACCCU | 2213 |
| rs4690074 | 4114 | GGGUUUCUUCGCUCAGCCU | 462 | 4114 | GGGUUUCUUCGCUCAGCCU | 462 | 4132 | AGGCUGAGCGAAGAAACCC | 2214 |
| rs4690074 | 4115 | GGUUUCUUCGCUCAGCCUU | 463 | 4115 | GGUUUCUUCGCUCAGCCUU | 463 | 4133 | AAGGCUGAGCGAAGAAACC | 2215 |
| rs4690074 | 4116 | GUUUCUUCGCUCAGCCUUG | 464 | 4116 | GUUUCUUCGCUCAGCCUUG | 464 | 4134 | CAAGGCUGAGCGAAGAAAC | 2216 |
| rs4690074 | 4117 | UUUCUUCGCUCAGCCUUGG | 465 | 4117 | UUUCUUCGCUCAGCCUUGG | 465 | 4135 | CCAAGGCUGAGCGAAGAAA | 2217 |
| rs4690074 | 4118 | UUCUUCGCUCAGCCUUGGA | 466 | 4118 | UUCUUCGCUCAGCCUUGGA | 466 | 4136 | UCCAAGGCUGAGCGAAGAA | 2218 |
| rs4690074 | 4119 | UCUUCGCUCAGCCUUGGAU | 467 | 4119 | UCUUCGCUCAGCCUUGGAU | 467 | 4137 | AUCCAAGGCUGAGCGAAGA | 2219 |
| rs4690074 | 4120 | CUUCGCUCAGCCUUGGAUG | 468 | 4120 | CUUCGCUCAGCCUUGGAUG | 468 | 4138 | CAUCCAAGGCUGAGCGAAG | 2220 |
| rs4690074 | 4121 | UUCGCUCAGCCUUGGAUGU | 469 | 4121 | UUCGCUCAGCCUUGGAUGU | 469 | 4139 | ACAUCCAAGGCUGAGCGAA | 2221 |
| rs4690074 | 4122 | UCGCUCAGCCUUGGAUGUU | 470 | 4122 | UCGCUCAGCCUUGGAUGUU | 470 | 4140 | AACAUCCAAGGCUGAGCGA | 2222 |
| rs3025837 | 4456 | GUGCAGGCGGAGCAGGAGA | 471 | 4456 | GUGCAGGCGGAGCAGGAGA | 471 | 4474 | UCUCCUGCUCCGCCUGCAC | 2223 |
| rs3025837 | 4457 | UGCAGGCGGAGCAGGAGAA | 472 | 4457 | UGCAGGCGGAGCAGGAGAA | 472 | 4475 | UUCUCCUGCUCCGCCUGCA | 2224 |
| rs3025837 | 4458 | GCAGGCGGAGCAGGAGAAC | 473 | 4458 | GCAGGCGGAGCAGGAGAAC | 473 | 4476 | GUUCUCCUGCUCCGCCUGC | 2225 |
| rs3025837 | 4459 | CAGGCGGAGCAGGAGAACG | 474 | 4459 | CAGGCGGAGCAGGAGAACG | 474 | 4477 | CGUUCUCCUGCUCCGCCUG | 2226 |
| rs3025837 | 4460 | AGGCGGAGCAGGAGAACGA | 475 | 4460 | AGGCGGAGCAGGAGAACGA | 475 | 4478 | UCGUUCUCCUGCUCCGCCU | 2227 |
| rs3025837 | 4461 | GGCGGAGCAGGAGAACGAC | 476 | 4461 | GGCGGAGCAGGAGAACGAC | 476 | 4479 | GUCGUUCUCCUGCUCCGCC | 2228 |
| rs3025837 | 4462 | GCGGAGCAGGAGAACGACA | 477 | 4462 | GCGGAGCAGGAGAACGACA | 477 | 4480 | UGUCGUUCUCCUGCUCCGC | 2229 |
| rs3025837 | 4463 | CGGAGCAGGAGAACGACAC | 478 | 4463 | CGGAGCAGGAGAACGACAC | 478 | 4481 | GUGUCGUUCUCCUGCUCCG | 2230 |
| rs3025837 | 4464 | GGAGCAGGAGAACGACACC | 479 | 4464 | GGAGCAGGAGAACGACACC | 479 | 4482 | GGUGUCGUUCUCCUGCUCC | 2231 |
| rs3025837 | 4465 | GAGCAGGAGAACGACACCU | 480 | 4465 | GAGCAGGAGAACGACACCU | 480 | 4483 | AGGUGUCGUUCUCCUGCUC | 2232 |
| rs3025837 | 4466 | AGCAGGAGAACGACACCUC | 481 | 4466 | AGCAGGAGAACGACACCUC | 481 | 4484 | GAGGUGUCGUUCUCCUGCU | 2233 |
| rs3025837 | 4467 | GCAGGAGAACGACACCUCG | 482 | 4467 | GCAGGAGAACGACACCUCG | 482 | 4485 | CGAGGUGUCGUUCUCCUGC | 2234 |
| rs3025837 | 4468 | CAGGAGAACGACACCUCGG | 483 | 4468 | CAGGAGAACGACACCUCGG | 483 | 4486 | CCGAGGUGUCGUUCUCCUG | 2235 |
| rs3025837 | 4469 | AGGAGAACGACACCUCGGG | 484 | 4469 | AGGAGAACGACACCUCGGG | 484 | 4487 | CCCGAGGUGUCGUUCUCCU | 2236 |
| rs3025837 | 4470 | GGAGAACGACACCUCGGGA | 485 | 4470 | GGAGAACGACACCUCGGGA | 485 | 4488 | UCCCGAGGUGUCGUUCUCC | 2237 |
| rs3025837 | 4471 | GAGAACGACACCUCGGGAU | 486 | 4471 | GAGAACGACACCUCGGGAU | 486 | 4489 | AUCCCGAGGUGUCGUUCUC | 2238 |
| rs3025837 | 4472 | AGAACGACACCUCGGGAUG | 487 | 4472 | AGAACGACACCUCGGGAUG | 487 | 4490 | CAUCCCGAGGUGUCGUUCU | 2239 |
| rs3025837 | 4473 | GAACGACACCUCGGGAUGG | 488 | 4473 | GAACGACACCUCGGGAUGG | 488 | 4491 | CCAUCCCGAGGUGUCGUUC | 2240 |
| rs3025837 | 4474 | PACGACACCUCGGGAUGGU | 489 | 4474 | AACGACACCUCGGGAUGGU | 489 | 4492 | ACCAUCCCGAGGUGUCGUU | 2241 |
| rs3025837 | 4456 | GUGCAGGCGGAGCAGGAGC | 490 | 4456 | GUGCAGGCGGAGCAGGAGC | 490 | 4474 | GCUCCUGCUCCGCCUGCAC | 2242 |
| rs3025837 | 4457 | UGCAGGCGGAGCAGGAGCA | 491 | 4457 | UGCAGGCGGAGCAGGAGCA | 491 | 4475 | UGCUCCUGCUCCGCCUGCA | 2243 |
| rs3025837 | 4458 | GCAGGCGGAGCAGGAGCAC | 492 | 4458 | GCAGGCGGAGCAGGAGCAC | 492 | 4476 | GUGCUCCUGCUCCGCCUGC | 2244 |
| rs3025837 | 4459 | CAGGCGGAGCAGGAGCACG | 493 | 4459 | CAGGCGGAGCAGGAGCACG | 493 | 4477 | CGUGCUCCUGCUCCGCCUG | 2245 |
| rs3025837 | 4460 | AGGCGGAGCAGGAGCACGA | 494 | 4460 | AGGCGGAGCAGGAGCACGA | 494 | 4478 | UCGUGCUCCUGCUCCGCCU | 2246 |
| rs3025837 | 4461 | GGCGGAGCAGGAGCACGAC | 495 | 4461 | GGCGGAGCAGGAGCACGAC | 495 | 4479 | GUCGUGCUCCUGCUCCGCC | 2247 |
| rs3025837 | 4462 | GCGGAGCAGGAGCACGACA | 496 | 4462 | GCGGAGCAGGAGCACGACA | 496 | 4480 | UGUCGUGCUCCUGCUCCGC | 2248 |
| rs3025837 | 4463 | CGGAGCAGGAGCACGACAC | 497 | 4463 | CGGAGCAGGAGCACGACAC | 497 | 4481 | GUGUCGUGCUCCUGCUCCG | 2249 |
| rs3025837 | 4464 | GGAGCAGGAGCACGACACC | 498 | 4464 | GGAGCAGGAGCACGACACC | 498 | 4482 | GGUGUCGUGCUCCUGCUCC | 2250 |
| rs3025837 | 4465 | GAGCAGGAGCACGACACCU | 499 | 4465 | GAGCAGGAGCACGACACCU | 499 | 4483 | AGGUGUCGUGCUCCUGCUC | 2251 |
| rs3025837 | 4466 | AGCAGGAGCACGACACCUC | 500 | 4466 | AGCAGGAGCACGACACCUC | 500 | 4484 | GAGGUGUCGUGCUCCUGCU | 2252 |
| rs3025837 | 4467 | GCAGGAGCACGACACCUCG | 501 | 4467 | GCAGGAGCACGACACCUCG | 501 | 4485 | CGAGGUGUCGUGCUCCUGC | 2253 |
| rs3025837 | 4468 | CAGGAGCACGACACCUCGG | 502 | 4468 | CAGGAGCACGACACCUCGG | 502 | 4486 | CCGAGGUGUCGUGCUCCUG | 2254 |
| rs3025837 | 4469 | AGGAGCACGACACCUCGGG | 503 | 4469 | AGGAGCACGACACCUCGGG | 503 | 4487 | CCCGAGGUGUCGUGCUCCU | 2255 |
| rs3025837 | 4470 | GGAGCACGACACCUCGGGA | 504 | 4470 | GGAGCACGACACCUCGGGA | 504 | 4488 | UCCCGAGGUGUCGUGCUCC | 2256 |
| rs3025837 | 4471 | GAGCACGACACCUCGGGAU | 505 | 4471 | GAGCACGACACCUCGGGAU | 505 | 4489 | AUCCCGAGGUGUCGUGCUC | 2257 |
| rs3025837 | 4472 | AGCACGACACCUCGGGAUG | 506 | 4472 | AGCACGACACCUCGGGAUG | 506 | 4490 | CAUCCCGAGGUGUCGUGCU | 2258 |
| rs3025837 | 4473 | GCACGACACCUCGGGAUGG | 507 | 4473 | GCACGACACCUCGGGAUGG | 507 | 4491 | CCAUCCCGAGGUGUCGUGC | 2259 |
| rs3025837 | 4474 | CACGACACCUCGGGAUGGU | 508 | 4474 | CACGACACCUCGGGAUGGU | 508 | 4492 | ACCAUCCCGAGGUGUCGUG | 2260 |
| rs363129 | 4967 | UCUUUGUAUUAAGAGGAAC | 509 | 4967 | UCUUUGUAUUAAGAGGAAC | 509 | 4985 | GUUCCUCUUAAUACAAAGA | 2261 |
| rs363129 | 4968 | CUUUGUAUUAAGAGGAACA | 510 | 4968 | CUUUGUAUUAAGAGGAACA | 510 | 4986 | UGUUCCUCUUAAUACAAAG | 2262 |
| rs363129 | 4969 | UUUGUAUUAAGAGGAACAA | 511 | 4969 | UUUGUAUUAAGAGGAACAA | 511 | 4987 | UUGUUCCUCUUAAUACAAA | 2263 |
| rs363129 | 4970 | UUGUAUUAAGAGGAACAAA | 512 | 4970 | UUGUAUUAAGAGGAACAAA | 512 | 4988 | UUUGUUCCUCUUAAUACAA | 2264 |
| rs363129 | 4971 | UGUAUUAAGAGGAACAAAU | 513 | 4971 | UGUAUUAAGAGGAACAAAU | 513 | 4989 | AUUUGUUCCUCUUAAUACA | 2265 |
| rs363129 | 4972 | GUAUUAAGAGGAACAAAUA | 514 | 4972 | GUAUUAAGAGGAACAAAUA | 514 | 4990 | UAUUUGUUCCUCUUAAUAC | 2266 |
| rs363129 | 4973 | UAUUAAGAGGAACAAAUAA | 515 | 4973 | UAUUAAGAGGAACAAAUAA | 515 | 4991 | UUAUUUGUUCCUCUUAAUA | 2267 |
| rs363129 | 4974 | AUUAAGAGGAACAAAUAAA | 516 | 4974 | AUUAAGAGGAACAAAUAAA | 516 | 4992 | UUUAUUUGUUCCUCUUAAU | 2268 |
| rs363129 | 4975 | UUAAGAGGAACAAAUAAAG | 517 | 4975 | UUAAGAGGAACAAAUAAAG | 517 | 4993 | CUUUAUUUGUUCCUCUUAA | 2269 |
| rs363129 | 4976 | UAAGAGGAACAAAUAAAGC | 518 | 4976 | UAAGAGGAACAAAUAAAGC | 518 | 4994 | GCUUUAUUUGUUCCUCUUA | 2270 |
| rs363129 | 4977 | AAGAGGAACAAAUAAAGCU | 519 | 4977 | AAGAGGAACAAAUAAAGCU | 519 | 4995 | AGCUUUAUUUGUUCCUCUU | 2271 |
| rs363129 | 4978 | AGAGGAACAAAUAAAGCUG | 520 | 4978 | AGAGGAACAAAUAAAGCUG | 520 | 4996 | CAGCUUUAUUUGUUCCUCU | 2272 |
| rs363129 | 4979 | GAGGAACAAAUAAAGCUGA | 521 | 4979 | GAGGAACAAAUAAAGCUGA | 521 | 4997 | UCAGCUUUAUUUGUUCCUC | 2273 |
| rs363129 | 4980 | AGGAACAAAUAAAGCUGAU | 522 | 4980 | AGGAACAAAUAAAGCUGAU | 522 | 4998 | AUCAGCUUUAUUUGUUCCU | 2274 |
| rs363129 | 4981 | GGAACAAAUAAAGCUGAUG | 523 | 4981 | GGAACAAAUAAAGCUGAUG | 523 | 4999 | CAUCAGCUUUAUUUGUUCC | 2275 |
| rs363129 | 4982 | GAACAAAUAAAGCUGAUGC | 524 | 4982 | GAACAAAUAAAGCUGAUGC | 524 | 5000 | GCAUCAGCUUUAUUUGUUC | 2276 |
| rs363129 | 4983 | AACAAAUAAAGCUGAUGCA | 525 | 4983 | AACAAAUAAAGCUGAUGCA | 525 | 5001 | UGCAUCAGCUUUAUUUGUU | 2277 |
| rs363129 | 4984 | ACAAAUAAAGCUGAUGCAG | 526 | 4984 | ACAAAUAAAGCUGAUGCAG | 526 | 5002 | CUGCAUCAGCUUUAUUUGU | 2278 |
| rs363129 | 4985 | CAAAUAAAGCUGAUGCAGG | 527 | 4985 | CAAAUAAAGCUGAUGCAGG | 527 | 5003 | CCUGCAUCAGCUUUAUUUG | 2279 |
| rs363129 | 4967 | UCUUUGUAUUAAGAGGAAU | 528 | 4967 | UCUUUGUAUUAAGAGGAAU | 528 | 4985 | AUUCCUCUUAAUACAAAGA | 2280 |
| rs363129 | 4968 | CUUUGUAUUAAGAGGAAUA | 529 | 4968 | CUUUGUAUUAAGAGGAAUA | 529 | 4986 | UAUUCCUCUUAAUACAAAG | 2281 |
| rs363129 | 4969 | UUUGUAUUAAGAGGAAUAA | 530 | 4969 | UUUGUAUUAAGAGGAAUAA | 530 | 4987 | UUAUUCCUCUUAAUACAAA | 2282 |
| rs363129 | 4970 | UUGUAUUAAGAGGAAUAAA | 531 | 4970 | UUGUAUUAAGAGGAAUAAA | 531 | 4988 | UUUAUUCCUCUUAAUACAA | 2283 |
| rs363129 | 4971 | UGUAUUAAGAGGAAUAAAU | 532 | 4971 | UGUAUUAAGAGGAAUAAAU | 532 | 4989 | AUUUAUUCCUCUUAAUACA | 2284 |
| rs363129 | 4972 | GUAUUAAGAGGAAUAAAUA | 533 | 4972 | GUAUUAAGAGGAAUAAAUA | 533 | 4990 | UAUUUAUUCCUCUUAAUAC | 2285 |
| rs363129 | 4973 | UAUUAAGAGGAAUAAAUAA | 534 | 4973 | UAUUAAGAGGAAUAAAUAA | 534 | 4991 | UUAUUUAUUCCUCUUAAUA | 2286 |
| rs363129 | 4974 | AUUAAGAGGAAUAAAUAAA | 535 | 4974 | AUUAAGAGGAAUAAAUAAA | 535 | 4992 | UUUAUUUAUUCCUCUUAAU | 2287 |
| rs363129 | 4975 | UUAAGAGGAAUAAAUAAAG | 536 | 4975 | UUAAGAGGAAUAAAUAAAG | 536 | 4993 | CUUUAUUUAUUCCUCUUAA | 2288 |
| rs363129 | 4976 | UAAGAGGAAUAAAUAAAGC | 537 | 4976 | UAAGAGGAAUAAAUAAAGC | 537 | 4994 | GCUUUAUUUAUUCCUCUUA | 2289 |
| rs363129 | 4977 | AAGAGGAAUAAAUAAAGCU | 538 | 4977 | AAGAGGAAUAAAUAAAGCU | 538 | 4995 | AGCUUUAUUUAUUCCUCUU | 2290 |
| rs363129 | 4978 | AGAGGAAUAAAUAAAGCUG | 539 | 4978 | AGAGGAAUAAAUAAAGCUG | 539 | 4996 | CAGCUUUAUUUAUUCCUCU | 2291 |
| rs363129 | 4979 | GAGGAAUAAAUAAAGCUGA | 540 | 4979 | GAGGAAUAAAUAAAGCUGA | 540 | 4997 | UCAGCUUUAUUUAUUCCUC | 2292 |
| rs363129 | 4980 | AGGAAUAAAUAAAGCUGAU | 541 | 4980 | AGGAAUAAAUAAAGCUGAU | 541 | 4998 | AUCAGCUUUAUUUAUUCCU | 2293 |
| rs363129 | 4981 | GGAAUAAAUAAAGCUGAUG | 542 | 4981 | GGAAUAAAUAAAGCUGAUG | 542 | 4999 | CAUCAGCUUUAUUUAUUCC | 2294 |
| rs363129 | 4982 | GAAUAAAUAAAGCUGAUGC | 543 | 4982 | GAAUAAAUAAAGCUGAUGC | 543 | 5000 | GCAUCAGCUUUAUUUAUUC | 2295 |
| rs363129 | 4983 | AAUAAAUAAAGCUGAUGCA | 544 | 4983 | AAUAAAUAAAGCUGAUGCA | 544 | 5001 | UGCAUCAGCUUUAUUUAUU | 2296 |
| rs363129 | 4984 | AUAAAUAAAGCUGAUGCAG | 545 | 4984 | AUAAAUAAAGCUGAUGCAG | 545 | 5002 | CUGCAUCAGCUUUAUUUAU | 2297 |
| rs363129 | 4985 | UAAAUAAAGCUGAUGCAGG | 546 | 4985 | UAAAUAAAGCUGAUGCAGG | 546 | 5003 | CCUGCAUCAGCUUUAUUUA | 2298 |
| rs363125 | 5462 | UAAGAGAUGGGGACAGUAC | 547 | 5462 | UAAGAGAUGGGGACAGUAC | 547 | 5480 | GUACUGUCCCCAUCUCUUA | 2299 |
| rs363125 | 5463 | AAGAGAUGGGGACAGUACU | 548 | 5463 | AAGAGAUGGGGACAGUACU | 548 | 5481 | AGUACUGUCCCCAUCUCUU | 2300 |
| rs363125 | 5464 | AGAGAUGGGGACAGUACUU | 549 | 5464 | AGAGAUGGGGACAGUACUU | 549 | 5482 | AAGUACUGUCCCCAUCUCU | 2301 |
| rs363125 | 5465 | GAGAUGGGGACAGUACUUC | 550 | 5465 | GAGAUGGGGACAGUACUUC | 550 | 5483 | GAAGUACUGUCCCCAUCUC | 2302 |
| rs363125 | 5466 | AGAUGGGGACAGUACUUCA | 551 | 5466 | AGAUGGGGACAGUACUUCA | 551 | 5484 | UGAAGUACUGUCCCCAUCU | 2303 |
| rs363125 | 5467 | GAUGGGGACAGUACUUCAA | 552 | 5467 | GAUGGGGACAGUACUUCAA | 552 | 5485 | UUGAAGUACUGUCCCCAUC | 2304 |
| rs363125 | 5468 | AUGGGGACAGUACUUCAAC | 553 | 5468 | AUGGGGACAGUACUUCAAC | 553 | 5486 | GUUGAAGUACUGUCCCCAU | 2305 |
| rs363125 | 5469 | UGGGGACAGUACUUCAACG | 554 | 5469 | UGGGGACAGUACUUCAACG | 554 | 5487 | CGUUGAAGUACUGUCCCCA | 2306 |
| rs363125 | 5470 | GGGGACAGUACUUCAACGC | 555 | 5470 | GGGGACAGUACUUCAACGC | 555 | 5488 | GCGUUGAAGUACUGUCCCC | 2307 |
| rs363125 | 5471 | GGGACAGUACUUCAACGCU | 556 | 5471 | GGGACAGUACUUCAACGCU | 556 | 5489 | AGCGUUGAAGUACUGUCCC | 2308 |
| rs363125 | 5472 | GGACAGUACUUCAACGCUA | 557 | 5472 | GGACAGUACUUCAACGCUA | 557 | 5490 | UAGCGUUGAAGUACUGUCC | 2309 |
| rs363125 | 5473 | GACAGUACUUCAACGCUAG | 558 | 5473 | GACAGUACUUCAACGCUAG | 558 | 5491 | CUAGCGUUGAAGUACUGUC | 2310 |
| rs363125 | 5474 | ACAGUACUUCAACGCUAGA | 559 | 5474 | ACAGUACUUCAACGCUAGA | 559 | 5492 | UCUAGCGUUGAAGUACUGU | 2311 |
| rs363125 | 5475 | CAGUACUUCAACGCUAGAA | 560 | 5475 | CAGUACUUCAACGCUAGAA | 560 | 5493 | UUCUAGCGUUGAAGUACUG | 2312 |
| rs363125 | 5476 | AGUACUUCAACGCUAGAAG | 561 | 5476 | AGUACUUCAACGCUAGAAG | 561 | 5494 | CUUCUAGCGUUGAAGUACU | 2313 |
| rs363125 | 5477 | GUACUUCAACGCUAGAAGA | 562 | 5477 | GUACUUCAACGCUAGAAGA | 562 | 5495 | UCUUCUAGCGUUGAAGUAC | 2314 |
| rs363125 | 5478 | UACUUCAACGCUAGAAGAA | 563 | 5478 | UACUUCAACGCUAGAAGAA | 563 | 5496 | UUCUUCUAGCGUUGAAGUA | 2315 |
| rs363125 | 5479 | ACUUCAACGCUAGAAGAAC | 564 | 5479 | ACUUCAACGCUAGAAGAAC | 564 | 5497 | GUUCUUCUAGCGUUGAAGU | 2316 |
| rs363125 | 5480 | CUUCAACGCUAGAAGAACA | 565 | 5480 | CUUCAACGCUAGAAGAACA | 565 | 5498 | UGUUCUUCUAGCGUUGAAG | 2317 |
| rs363125 | 5462 | UAAGAGAUGGGGACAGUAA | 566 | 5462 | UAAGAGAUGGGGACAGUAA | 566 | 5480 | UUACUGUCCCCAUCUCUUA | 2318 |
| rs363125 | 5463 | AAGAGAUGGGGACAGUAAU | 567 | 5463 | AAGAGAUGGGGACAGUAAU | 567 | 5481 | AUUACUGUCCCCAUCUCUU | 2319 |
| rs363125 | 5464 | AGAGAUGGGGACAGUAAUU | 568 | 5464 | AGAGAUGGGGACAGUAAUU | 568 | 5482 | AAUUACUGUCCCCAUCUCU | 2320 |
| rs363125 | 5465 | GAGAUGGGGACAGUAAUUC | 569 | 5465 | GAGAUGGGGACAGUAAUUC | 569 | 5483 | GAAUUACUGUCCCCAUCUC | 2321 |
| rs363125 | 5466 | AGAUGGGGACAGUAAUUCA | 570 | 5466 | AGAUGGGGACAGUAAUUCA | 570 | 5484 | UGAAUUACUGUCCCCAUCU | 2322 |
| rs363125 | 5467 | GAUGGGGACAGUAAUUCAA | 571 | 5467 | GAUGGGGACAGUAAUUCAA | 571 | 5485 | UUGAAUUACUGUCCCCAUC | 2323 |
| rs363125 | 5468 | AUGGGGACAGUAAUUCAAC | 572 | 5468 | AUGGGGACAGUAAUUCAAC | 572 | 5486 | GUUGAAUUACUGUCCCCAU | 2324 |
| rs363125 | 5469 | UGGGGACAGUAAUUCAACG | 573 | 5469 | UGGGGACAGUAAUUCAACG | 573 | 5487 | CGUUGAAUUACUGUCCCCA | 2325 |
| rs363125 | 5470 | GGGGACAGUAAUUCAACGC | 574 | 5470 | GGGGACAGUAAUUCAACGC | 574 | 5488 | GCGUUGAAUUACUGUCCCC | 2326 |
| rs363125 | 5471 | GGGACAGUAAUUCAACGCU | 575 | 5471 | GGGACAGUAAUUCAACGCU | 575 | 5489 | AGCGUUGAAUUACUGUCCC | 2327 |
| rs363125 | 5472 | GGACAGUAAUUCAACGCUA | 576 | 5472 | GGACAGUAAUUCAACGCUA | 576 | 5490 | UAGCGUUGAAUUACUGUCC | 2328 |
| rs363125 | 5473 | GACAGUAAUUCAACGCUAG | 577 | 5473 | GACAGUAAUUCAACGCUAG | 577 | 5491 | CUAGCGUUGAAUUACUGUC | 2329 |
| rs363125 | 5474 | ACAGUAAUUCAACGCUAGA | 578 | 5474 | ACAGUAAUUCAACGCUAGA | 578 | 5492 | UCUAGCGUUGAAUUACUGU | 2330 |
| rs363125 | 5475 | CAGUAAUUCAACGCUAGAA | 579 | 5475 | CAGUAAUUCAACGCUAGAA | 579 | 5493 | UUCUAGCGUUGAAUUACUG | 2331 |
| rs363125 | 5476 | AGUAAUUCAACGCUAGAAG | 580 | 5476 | AGUAAUUCAACGCUAGAAG | 580 | 5494 | CUUCUAGCGUUGAAUUACU | 2332 |
| rs363125 | 5477 | GUAAUUCAACGCUAGAAGA | 581 | 5477 | GUAAUUCAACGCUAGAAGA | 581 | 5495 | UCUUCUAGCGUUGAAUUAC | 2333 |
| rs363125 | 5478 | UAAUUCAACGCUAGAAGAA | 582 | 5478 | UAAUUCAACGCUAGAAGAA | 582 | 5496 | UUCUUCUAGCGUUGAAUUA | 2334 |
| rs363125 | 5479 | AAUUCAACGCUAGAAGAAC | 583 | 5479 | AAUUCAACGCUAGAAGAAC | 583 | 5497 | GUUCUUCUAGCGUUGAAUU | 2335 |
| rs363125 | 5480 | AUUCAACGCUAGAAGAACA | 584 | 5480 | AUUCAACGCUAGAAGAACA | 584 | 5498 | UGUUCUUCUAGCGUUGAAU | 2336 |
| rs4690077 | 6894 | GCCCGAGCUGCCUGCAGAG | 585 | 6894 | GCCCGAGCUGCCUGCAGAG | 585 | 6912 | CUCUGCAGGCAGCUCGGGC | 2337 |
| rs4690077 | 6895 | CCCGAGCUGCCUGCAGAGC | 586 | 6895 | CCCGAGCUGCCUGCAGAGC | 586 | 6913 | GCUCUGCAGGCAGCUCGGG | 2338 |
| rs4690077 | 6896 | CCGAGCUGCCUGCAGAGCC | 587 | 6896 | CCGAGCUGCCUGCAGAGCC | 587 | 6914 | GGCUCUGCAGGCAGCUCGG | 2339 |
| rs4690077 | 6897 | CGAGCUGCCUGCAGAGCCG | 588 | 6897 | CGAGCUGCCUGCAGAGCCG | 588 | 6915 | CGGCUCUGCAGGCAGCUCG | 2340 |
| rs4690077 | 6898 | GAGCUGCCUGCAGAGCCGG | 589 | 6898 | GAGCUGCCUGCAGAGCCGG | 589 | 6916 | CCGGCUCUGCAGGCAGCUC | 2341 |
| rs4690077 | 6899 | AGCUGCCUGCAGAGCCGGC | 590 | 6899 | AGCUGCCUGCAGAGCCGGC | 590 | 6917 | GCCGGCUCUGCAGGCAGCU | 2342 |
| rs4690077 | 6900 | GCUGCCUGCAGAGCCGGCG | 591 | 6900 | GCUGCCUGCAGAGCCGGCG | 591 | 6918 | CGCCGGCUCUGCAGGCAGC | 2343 |
| rs4690077 | 6901 | CUGCCUGCAGAGCCGGCGG | 592 | 6901 | CUGCCUGCAGAGCCGGCGG | 592 | 6919 | CCGCCGGCUCUGCAGGCAG | 2344 |
| rs4690077 | 6902 | UGCCUGCAGAGCCGGCGGC | 593 | 6902 | UGCCUGCAGAGCCGGCGGC | 593 | 6920 | GCCGCCGGCUCUGCAGGCA | 2345 |
| rs4690077 | 6903 | GCCUGCAGAGCCGGCGGCC | 594 | 6903 | GCCUGCAGAGCCGGCGGCC | 594 | 6921 | GGCCGCCGGCUCUGCAGGC | 2346 |
| rs4690077 | 6904 | CCUGCAGAGCCGGCGGCCU | 595 | 6904 | CCUGCAGAGCCGGCGGCCU | 595 | 6922 | AGGCCGCCGGCUCUGCAGG | 2347 |
| rs4690077 | 6905 | CUGCAGAGCCGGCGGCCUA | 596 | 6905 | CUGCAGAGCCGGCGGCCUA | 596 | 6923 | UAGGCCGCCGGCUCUGCAG | 2348 |
| rs4690077 | 6906 | UGCAGAGCCGGCGGCCUAC | 597 | 6906 | UGCAGAGCCGGCGGCCUAC | 597 | 6924 | GUAGGCCGCCGGCUCUGCA | 2349 |
| rs4690077 | 6907 | GCAGAGCCGGCGGCCUACU | 598 | 6907 | GCAGAGCCGGCGGCCUACU | 598 | 6925 | AGUAGGCCGCCGGCUCUGC | 2350 |
| rs4690077 | 6908 | CAGAGCCGGCGGCCUACUG | 599 | 6908 | CAGAGCCGGCGGCCUACUG | 599 | 6926 | CAGUAGGCCGCCGGCUCUG | 2351 |
| rs4690077 | 6909 | AGAGCCGGCGGCCUACUGG | 600 | 6909 | AGAGCCGGCGGCCUACUGG | 600 | 6927 | CCAGUAGGCCGCCGGCUCU | 2352 |
| rs4690077 | 6910 | GAGCCGGCGGCCUACUGGA | 601 | 6910 | GAGCCGGCGGCCUACUGGA | 601 | 6928 | UCCAGUAGGCCGCCGGCUC | 2353 |
| rs4690077 | 6911 | AGCCGGCGGCCUACUGGAG | 602 | 6911 | AGCCGGCGGCCUACUGGAG | 602 | 6929 | CUCCAGUAGGCCGCCGGCU | 2354 |
| rs4690077 | 6912 | GCCGGCGGCCUACUGGAGC | 603 | 6912 | GCCGGCGGCCUACUGGAGC | 603 | 6930 | GCUCCAGUAGGCCGCCGGC | 2355 |
| rs4690077 | 6894 | GCCCGAGCUGCCUGCAGAA | 604 | 6894 | GCCCGAGCUGCCUGCAGAA | 604 | 6912 | UUCUGCAGGCAGCUCGGGC | 2356 |
| rs4690077 | 6895 | CCCGAGCUGCCUGCAGAAC | 605 | 6895 | CCCGAGCUGCCUGCAGAAC | 605 | 6913 | GUUCUGCAGGCAGCUCGGG | 2357 |
| rs4690077 | 6896 | CCGAGCUGCCUGCAGAACC | 606 | 6896 | CCGAGCUGCCUGCAGAACC | 606 | 6914 | GGUUCUGCAGGCAGCUCGG | 2358 |
| rs4690077 | 6897 | CGAGCUGCCUGCAGAACCG | 607 | 6897 | CGAGCUGCCUGCAGAACCG | 607 | 6915 | CGGUUCUGCAGGCAGCUCG | 2359 |
| rs4690077 | 6898 | GAGCUGCCUGCAGAACCGG | 608 | 6898 | GAGCUGCCUGCAGAACCGG | 608 | 6916 | CCGGUUCUGCAGGCAGCUC | 2360 |
| rs4690077 | 6899 | AGCUGCCUGCAGAACCGGC | 609 | 6899 | AGCUGCCUGCAGAACCGGC | 609 | 6917 | GCCGGUUCUGCAGGCAGCU | 2361 |
| rs4690077 | 6900 | GCUGCCUGCAGAACCGGCG | 610 | 6900 | GCUGCCUGCAGAACCGGCG | 610 | 6918 | CGCCGGUUCUGCAGGCAGC | 2362 |
| rs4690077 | 6901 | CUGCCUGCAGAACCGGCGG | 611 | 6901 | CUGCCUGCAGAACCGGCGG | 611 | 6919 | CCGCCGGUUCUGCAGGCAG | 2363 |
| rs4690077 | 6902 | UGCCUGCAGAACCGGCGGC | 612 | 6902 | UGCCUGCAGAACCGGCGGC | 612 | 6920 | GCCGCCGGUUCUGCAGGCA | 2364 |
| rs4690077 | 6903 | GCCUGCAGAACCGGCGGCC | 613 | 6903 | GCCUGCAGAACCGGCGGCC | 613 | 6921 | GGCCGCCGGUUCUGCAGGC | 2365 |
| rs4690077 | 6904 | CCUGCAGAACCGGCGGCCU | 614 | 6904 | CCUGCAGAACCGGCGGCCU | 614 | 6922 | AGGCCGCCGGUUCUGCAGG | 2366 |
| rs4690077 | 6905 | CUGCAGAACCGGCGGCCUA | 615 | 6905 | CUGCAGAACCGGCGGCCUA | 615 | 6923 | UAGGCCGCCGGUUCUGCAG | 2367 |
| rs4690077 | 6906 | UGCAGAACCGGCGGCCUAC | 616 | 6906 | UGCAGAACCGGCGGCCUAC | 616 | 6924 | GUAGGCCGCCGGUUCUGCA | 2368 |
| rs4690077 | 6907 | GCAGAACCGGCGGCCUACU | 617 | 6907 | GCAGAACCGGCGGCCUACU | 617 | 6925 | AGUAGGCCGCCGGUUCUGC | 2369 |
| rs4690077 | 6908 | CAGAACCGGCGGCCUACUG | 618 | 6908 | CAGAACCGGCGGCCUACUG | 618 | 6926 | CAGUAGGCCGCCGGUUCUG | 2370 |
| rs4690077 | 6909 | AGAACCGGCGGCCUACUGG | 619 | 6909 | AGAACCGGCGGCCUACUGG | 619 | 6927 | CCAGUAGGCCGCCGGUUCU | 2371 |
| rs4690077 | 6910 | GAACCGGCGGCCUACUGGA | 620 | 6910 | GAACCGGCGGCCUACUGGA | 620 | 6928 | UCCAGUAGGCCGCCGGUUC | 2372 |
| rs4690077 | 6911 | AACCGGCGGCCUACUGGAG | 621 | 6911 | AACCGGCGGCCUACUGGAG | 621 | 6929 | CUCCAGUAGGCCGCCGGUU | 2373 |
| rs4690077 | 6912 | ACCGGCGGCCUACUGGAGC | 622 | 6912 | ACCGGCGGCCUACUGGAGC | 622 | 6930 | GCUCCAGUAGGCCGCCGGU | 2374 |
| rs362331 | 7228 | CACGCCUGCUCCCUCAUCU | 623 | 7228 | CACGCCUGCUCCCUCAUCU | 623 | 7246 | AGAUGAGGGAGCAGGCGUG | 2375 |
| rs362331 | 7229 | ACGCCUGCUCCCUCAUCUA | 624 | 7229 | ACGCCUGCUCCCUCAUCUA | 624 | 7247 | UAGAUGAGGGAGCAGGCGU | 2376 |
| rs362331 | 7230 | CGCCUGCUCCCUCAUCUAC | 625 | 7230 | CGCCUGCUCCCUCAUCUAC | 625 | 7248 | GUAGAUGAGGGAGCAGGCG | 2377 |
| rs362331 | 7231 | GCCUGCUCCCUCAUCUACU | 626 | 7231 | GCCUGCUCCCUCAUCUACU | 626 | 7249 | AGUAGAUGAGGGAGCAGGC | 2378 |
| rs362331 | 7232 | CCUGCUCCCUCAUCUACUG | 627 | 7232 | CCUGCUCCCUCAUCUACUG | 627 | 7250 | CAGUAGAUGAGGGAGCAGG | 2379 |
| rs362331 | 7233 | CUGCUCCCUCAUCUACUGU | 628 | 7233 | CUGCUCCCUCAUCUACUGU | 628 | 7251 | ACAGUAGAUGAGGGAGCAG | 2380 |
| rs362331 | 7234 | UGCUCCCUCAUCUACUGUG | 629 | 7234 | UGCUCCCUCAUCUACUGUG | 629 | 7252 | CACAGUAGAUGAGGGAGCA | 2381 |
| rs362331 | 7235 | GCUCCCUCAUCUACUGUGU | 630 | 7235 | GCUCCCUCAUCUACUGUGU | 630 | 7253 | ACACAGUAGAUGAGGGAGC | 2382 |
| rs362331 | 7236 | CUCCCUCAUCUACUGUGUG | 631 | 7236 | CUCCCUCAUCUACUGUGUG | 631 | 7254 | CACACAGUAGAUGAGGGAG | 2383 |
| rs362331 | 7237 | UCCCUCAUCUACUGUGUGC | 632 | 7237 | UCCCUCAUCUACUGUGUGC | 632 | 7255 | GCACACAGUAGAUGAGGGA | 2384 |
| rs362331 | 7238 | CCCUCAUCUACUGUGUGCA | 633 | 7238 | CCCUCAUCUACUGUGUGCA | 633 | 7256 | UGCACACAGUAGAUGAGGG | 2385 |
| rs362331 | 7239 | CCUCAUCUACUGUGUGCAC | 634 | 7239 | CCUCAUCUACUGUGUGCAC | 634 | 7257 | GUGCACACAGUAGAUGAGG | 2386 |
| rs362331 | 7240 | CUCAUCUACUGUGUGCACU | 635 | 7240 | CUCAUCUACUGUGUGCACU | 635 | 7258 | AGUGCACACAGUAGAUGAG | 2387 |
| rs362331 | 7241 | UCAUCUACUGUGUGCACUU | 636 | 7241 | UCAUCUACUGUGUGCACUU | 636 | 7259 | AAGUGCACACAGUAGAUGA | 2388 |
| rs362331 | 7242 | CAUCUACUGUGUGCACUUC | 637 | 7242 | CAUCUACUGUGUGCACUUC | 637 | 7260 | GAAGUGCACACAGUAGAUG | 2389 |
| rs362331 | 7243 | AUCUACUGUGUGCACUUCA | 638 | 7243 | AUCUACUGUGUGCACUUCA | 638 | 7261 | UGAAGUGCACACAGUAGAU | 2390 |
| rs362331 | 7244 | UCUACUGUGUGCACUUCAU | 639 | 7244 | UCUACUGUGUGCACUUCAU | 639 | 7262 | AUGAAGUGCACACAGUAGA | 2391 |
| rs362331 | 7245 | CUACUGUGUGCACUUCAUC | 640 | 7245 | CUACUGUGUGCACUUCAUC | 640 | 7263 | GAUGAAGUGCACACAGUAG | 2392 |
| rs362331 | 7246 | UACUGUGUGCACUUCAUCC | 641 | 7246 | UACUGUGUGCACUUCAUCC | 641 | 7264 | GGAUGAAGUGCACACAGUA | 2393 |
| rs362331 | 7228 | CACGCCUGCUCCCUCAUCC | 642 | 7228 | CACGCCUGCUCCCUCAUCC | 642 | 7246 | GGAUGAGGGAGCAGGCGUG | 2394 |
| rs362331 | 7229 | ACGCCUGCUCCCUCAUCCA | 643 | 7229 | ACGCCUGCUCCCUCAUCCA | 643 | 7247 | UGGAUGAGGGAGCAGGCGU | 2395 |
| rs362331 | 7230 | CGCCUGCUCCCUCAUCCAC | 644 | 7230 | CGCCUGCUCCCUCAUCCAC | 644 | 7248 | GUGGAUGAGGGAGCAGGCG | 2396 |
| rs362331 | 7231 | GCCUGCUCCCUCAUCCACU | 645 | 7231 | GCCUGCUCCCUCAUCCACU | 645 | 7249 | AGUGGAUGAGGGAGCAGGC | 2397 |
| rs362331 | 7232 | CCUGCUCCCUCAUCCACUG | 646 | 7232 | CCUGCUCCCUCAUCCACUG | 646 | 7250 | CAGUGGAUGAGGGAGCAGG | 2398 |
| rs362331 | 7233 | CUGCUCCCUCAUCCACUGU | 647 | 7233 | CUGCUCCCUCAUCCACUGU | 647 | 7251 | ACAGUGGAUGAGGGAGCAG | 2399 |
| rs362331 | 7234 | UGCUCCCUCAUCCACUGUG | 648 | 7234 | UGCUCCCUCAUCCACUGUG | 648 | 7252 | CACAGUGGAUGAGGGAGCA | 2400 |
| rs362331 | 7235 | GCUCCCUCAUCCACUGUGU | 649 | 7235 | GCUCCCUCAUCCACUGUGU | 649 | 7253 | ACACAGUGGAUGAGGGAGC | 2401 |
| rs362331 | 7236 | CUCCCUCAUCCACUGUGUG | 650 | 7236 | CUCCCUCAUCCACUGUGUG | 650 | 7254 | CACACAGUGGAUGAGGGAG | 2402 |
| rs362331 | 7237 | UCCCUCAUCCACUGUGUGC | 651 | 7237 | UCCCUCAUCCACUGUGUGC | 651 | 7255 | GCACACAGUGGAUGAGGGA | 2403 |
| rs362331 | 7238 | CCCUCAUCCACUGUGUGCA | 652 | 7238 | CCCUCAUCCACUGUGUGCA | 652 | 7256 | UGCACACAGUGGAUGAGGG | 2404 |
| rs362331 | 7239 | CCUCAUCCACUGUGUGCAC | 653 | 7239 | CCUCAUCCACUGUGUGCAC | 653 | 7257 | GUGCACACAGUGGAUGAGG | 2405 |
| rs362331 | 7240 | CUCAUCCACUGUGUGCACU | 654 | 7240 | CUCAUCCACUGUGUGCACU | 654 | 7258 | AGUGCACACAGUGGAUGAG | 2406 |
| rs362331 | 7241 | UCAUCCACUGUGUGCACUU | 655 | 7241 | UCAUCCACUGUGUGCACUU | 655 | 7259 | AAGUGCACACAGUGGAUGA | 2407 |
| rs362331 | 7242 | CAUCCACUGUGUGCACUUC | 656 | 7242 | CAUCCACUGUGUGCACUUC | 656 | 7260 | GAAGUGCACACAGUGGAUG | 2408 |
| rs362331 | 7243 | AUCCACUGUGUGCACUUCA | 657 | 7243 | AUCCACUGUGUGCACUUCA | 657 | 7261 | UGAAGUGCACACAGUGGAU | 2409 |
| rs362331 | 7244 | UCCACUGUGUGCACUUCAU | 658 | 7244 | UCCACUGUGUGCACUUCAU | 658 | 7262 | AUGAAGUGCACACAGUGGA | 2410 |
| rs362331 | 7245 | CCACUGUGUGCACUUCAUC | 659 | 7245 | CCACUGUGUGCACUUCAUC | 659 | 7263 | GAUGAAGUGCACACAGUGG | 2411 |
| rs362331 | 7246 | CACUGUGUGCACUUCAUCC | 660 | 7246 | CACUGUGUGCACUUCAUCC | 660 | 7264 | GGAUGAAGUGCACACAGUG | 2412 |
| rs3025818 | 7365 | AAACACACAGAAUCCUAAG | 661 | 7365 | AAACACACAGAAUCCUAAG | 661 | 7383 | CUUAGGAUUCUGUGUGUUU | 2413 |
| rs3025818 | 7366 | AACACACAGAAUCCUAAGU | 662 | 7366 | AACACACAGAAUCCUAAGU | 662 | 7384 | ACUUAGGAUUCUGUGUGUU | 2414 |
| rs3025818 | 7367 | ACACACAGAAUCCUAAGUA | 663 | 7367 | ACACACAGAAUCCUAAGUA | 663 | 7385 | UACUUAGGAUUCUGUGUGU | 2415 |
| rs3025818 | 7368 | CACACAGAAUCCUAAGUAU | 664 | 7368 | CACACAGAAUCCUAAGUAU | 664 | 7386 | AUACUUAGGAUUCUGUGUG | 2416 |
| rs3025818 | 7369 | ACACAGAAUCCUAAGUAUA | 665 | 7369 | ACACAGAAUCCUAAGUAUA | 665 | 7387 | UAUACUUAGGAUUCUGUGU | 2417 |
| rs3025818 | 7370 | CACAGAAUCCUAAGUAUAU | 666 | 7370 | CACAGAAUCCUAAGUAUAU | 666 | 7388 | AUAUACUUAGGAUUCUGUG | 2418 |
| rs3025818 | 7371 | ACAGAAUCCUAAGUAUAUC | 667 | 7371 | ACAGAAUCCUAAGUAUAUC | 667 | 7389 | GAUAUACUUAGGAUUCUGU | 2419 |
| rs3025818 | 7372 | CAGAAUCCUAAGUAUAUCA | 668 | 7372 | CAGAAUCCUAAGUAUAUCA | 668 | 7390 | UGAUAUACUUAGGAUUCUG | 2420 |
| rs3025818 | 7373 | AGAAUCCUAAGUAUAUCAC | 669 | 7373 | AGAAUCCUAAGUAUAUCAC | 669 | 7391 | GUGAUAUACUUAGGAUUCU | 2421 |
| rs3025818 | 7374 | GAAUCCUAAGUAUAUCACU | 670 | 7374 | GAAUCCUAAGUAUAUCACU | 670 | 7392 | AGUGAUAUACUUAGGAUUC | 2422 |
| rs3025818 | 7375 | AAUCCUAAGUAUAUCACUG | 671 | 7375 | AAUCCUAAGUAUAUCACUG | 671 | 7393 | CAGUGAUAUACUUAGGAUU | 2423 |
| rs3025818 | 7376 | AUCCUAAGUAUAUCACUGC | 672 | 7376 | AUCCUAAGUAUAUCACUGC | 672 | 7394 | GCAGUGAUAUACUUAGGAU | 2424 |
| rs3025818 | 7377 | UCCUAAGUAUAUCACUGCA | 673 | 7377 | UCCUAAGUAUAUCACUGCA | 673 | 7395 | UGCAGUGAUAUACUUAGGA | 2425 |
| rs3025818 | 7378 | CCUAAGUAUAUCACUGCAG | 674 | 7378 | CCUAAGUAUAUCACUGCAG | 674 | 7396 | CUGCAGUGAUAUACUUAGG | 2426 |
| rs3025818 | 7379 | CUAAGUAUAUCACUGCAGC | 675 | 7379 | CUAAGUAUAUCACUGCAGC | 675 | 7397 | GCUGCAGUGAUAUACUUAG | 2427 |
| rs3025818 | 7380 | UAAGUAUAUCACUGCAGCC | 676 | 7380 | UAAGUAUAUCACUGCAGCC | 676 | 7398 | GGCUGCAGUGAUAUACUUA | 2428 |
| rs3025818 | 7381 | AAGUAUAUCACUGCAGCCU | 677 | 7381 | AAGUAUAUCACUGCAGCCU | 677 | 7399 | AGGCUGCAGUGAUAUACUU | 2429 |
| rs3025818 | 7382 | AGUAUAUCACUGCAGCCUG | 678 | 7382 | AGUAUAUCACUGCAGCCUG | 678 | 7400 | CAGGCUGCAGUGAUAUACU | 2430 |
| rs3025818 | 7383 | GUAUAUCACUGCAGCCUGU | 679 | 7383 | GUAUAUCACUGCAGCCUGU | 679 | 7401 | ACAGGCUGCAGUGAUAUAC | 2431 |
| rs3025818 | 7365 | AAACACACAGAAUCCUAAA | 680 | 7365 | AAACACACAGAAUCCUAAA | 680 | 7383 | UUUAGGAUUCUGUGUGUUU | 2432 |
| rs3025818 | 7366 | AACACACAGAAUCCUAAAU | 681 | 7366 | AACACACAGAAUCCUAAAU | 681 | 7384 | AUUUAGGAUUCUGUGUGUU | 2433 |
| rs3025818 | 7367 | ACACACAGAAUCCUAAAUA | 682 | 7367 | ACACACAGAAUCCUAAAUA | 682 | 7385 | UAUUUAGGAUUCUGUGUGU | 2434 |
| rs3025818 | 7368 | CACACAGAAUCCUAAAUAU | 683 | 7368 | CACACAGAAUCCUAAAUAU | 683 | 7386 | AUAUUUAGGAUUCUGUGUG | 2435 |
| rs3025818 | 7369 | ACACAGAAUCCUAAAUAUA | 684 | 7369 | ACACAGAAUCCUAAAUAUA | 684 | 7387 | UAUAUUUAGGAUUCUGUGU | 2436 |
| rs3025818 | 7370 | CACAGAAUCCUAAAUAUAU | 685 | 7370 | CACAGAAUCCUAAAUAUAU | 685 | 7388 | AUAUAUUUAGGAUUCUGUG | 2437 |
| rs3025818 | 7371 | ACAGAAUCCUAAAUAUAUC | 686 | 7371 | ACAGAAUCCUAAAUAUAUC | 686 | 7389 | GAUAUAUUUAGGAUUCUGU | 2438 |
| rs3025818 | 7372 | CAGAAUCCUAAAUAUAUCA | 687 | 7372 | CAGAAUCCUAAAUAUAUCA | 687 | 7390 | UGAUAUAUUUAGGAUUCUG | 2439 |
| rs3025818 | 7373 | AGAAUCCUAAAUAUAUCAC | 688 | 7373 | AGAAUCCUAAAUAUAUCAC | 688 | 7391 | GUGAUAUAUUUAGGAUUCU | 2440 |
| rs3025818 | 7374 | GAAUCCUAAAUAUAUCACU | 689 | 7374 | GAAUCCUAAAUAUAUCACU | 689 | 7392 | AGUGAUAUAUUUAGGAUUC | 2441 |
| rs3025818 | 7375 | AAUCCUAAAUAUAUCACUG | 690 | 7375 | AAUCCUAAAUAUAUCACUG | 690 | 7393 | CAGUGAUAUAUUUAGGAUU | 2442 |
| rs3025818 | 7376 | AUCCUAAAUAUAUCACUGC | 691 | 7376 | AUCCUAAAUAUAUCACUGC | 691 | 7394 | GCAGUGAUAUAUUUAGGAU | 2443 |
| rs3025818 | 7377 | UCCUAAAUAUAUCACUGCA | 692 | 7377 | UCCUAAAUAUAUCACUGCA | 692 | 7395 | UGCAGUGAUAUAUUUAGGA | 2444 |
| rs3025818 | 7378 | CCUAAAUAUAUCACUGCAG | 693 | 7378 | CCUAAAUAUAUCACUGCAG | 693 | 7396 | CUGCAGUGAUAUAUUUAGG | 2445 |
| rs3025818 | 7379 | CUAAAUAUAUCACUGCAGC | 694 | 7379 | CUAAAUAUAUCACUGCAGC | 694 | 7397 | GCUGCAGUGAUAUAUUUAG | 2446 |
| rs3025818 | 7380 | UAAAUAUAUCACUGCAGCC | 695 | 7380 | UAAAUAUAUCACUGCAGCC | 695 | 7398 | GGCUGCAGUGAUAUAUUUA | 2447 |
| rs3025818 | 7381 | AAAUAUAUCACUGCAGCCU | 696 | 7381 | AAAUAUAUCACUGCAGCCU | 696 | 7399 | AGGCUGCAGUGAUAUAUUU | 2448 |
| rs3025818 | 7382 | AAUAUAUCACUGCAGCCUG | 697 | 7382 | AAUAUAUCACUGCAGCCUG | 697 | 7400 | CAGGCUGCAGUGAUAUAUU | 2449 |
| rs3025818 | 7383 | AUAUAUCACUGCAGCCUGU | 698 | 7383 | AUAUAUCACUGCAGCCUGU | 698 | 7401 | ACAGGCUGCAGUGAUAUAU | 2450 |
| rs2857790 | 7479 | GUUUCUCACGCCAUUGCUC | 699 | 7479 | GUUUCUCACGCCAUUGCUC | 699 | 7497 | GAGCAAUGGCGUGAGAAAC | 2451 |
| rs2857790 | 7480 | UUUCUCACGCCAUUGCUCA | 700 | 7480 | UUUCUCACGCCAUUGCUCA | 700 | 7498 | UGAGCAAUGGCGUGAGAAA | 2452 |
| rs2857790 | 7481 | UUCUCACGCCAUUGCUCAG | 701 | 7481 | UUCUCACGCCAUUGCUCAG | 701 | 7499 | CUGAGCAAUGGCGUGAGAA | 2453 |
| rs2857790 | 7482 | UCUCACGCCAUUGCUCAGG | 702 | 7482 | UCUCACGCCAUUGCUCAGG | 702 | 7500 | CCUGAGCAAUGGCGUGAGA | 2454 |
| rs2857790 | 7483 | CUCACGCCAUUGCUCAGGA | 703 | 7483 | CUCACGCCAUUGCUCAGGA | 703 | 7501 | UCCUGAGCAAUGGCGUGAG | 2455 |
| rs2857790 | 7484 | UCACGCCAUUGCUCAGGAA | 704 | 7484 | UCACGCCAUUGCUCAGGAA | 704 | 7502 | UUCCUGAGCAAUGGCGUGA | 2456 |
| rs2857790 | 7485 | CACGCCAUUGCUCAGGAAC | 705 | 7485 | CACGCCAUUGCUCAGGAAC | 705 | 7503 | GUUCCUGAGCAAUGGCGUG | 2457 |
| rs2857790 | 7486 | ACGCCAUUGCUCAGGAACA | 706 | 7486 | ACGCCAUUGCUCAGGAACA | 706 | 7504 | UGUUCCUGAGCAAUGGCGU | 2458 |
| rs2857790 | 7487 | CGCCAUUGCUCAGGAACAU | 707 | 7487 | CGCCAUUGCUCAGGAACAU | 707 | 7505 | AUGUUCCUGAGCAAUGGCG | 2459 |
| rs2857790 | 7488 | GCCAUUGCUCAGGAACAUC | 708 | 7488 | GCCAUUGCUCAGGAACAUC | 708 | 7506 | GAUGUUCCUGAGCAAUGGC | 2460 |
| rs2857790 | 7489 | CCAUUGCUCAGGAACAUCA | 709 | 7489 | CCAUUGCUCAGGAACAUCA | 709 | 7507 | UGAUGUUCCUGAGCAAUGG | 2461 |
| rs2857790 | 7490 | CAUUGCUCAGGAACAUCAU | 710 | 7490 | CAUUGCUCAGGAACAUCAU | 710 | 7508 | AUGAUGUUCCUGAGCAAUG | 2462 |
| rs2857790 | 7491 | AUUGCUCAGGAACAUCAUC | 711 | 7491 | AUUGCUCAGGAACAUCAUC | 711 | 7509 | GAUGAUGUUCCUGAGCAAU | 2463 |
| rs2857790 | 7492 | UUGCUCAGGAACAUCAUCA | 712 | 7492 | UUGCUCAGGAACAUCAUCA | 712 | 7510 | UGAUGAUGUUCCUGAGCAA | 2464 |
| rs2857790 | 7493 | UGCUCAGGAACAUCAUCAU | 713 | 7493 | UGCUCAGGAACAUCAUCAU | 713 | 7511 | AUGAUGAUGUUCCUGAGCA | 2465 |
| rs2857790 | 7494 | GCUCAGGAACAUCAUCAUC | 714 | 7494 | GCUCAGGAACAUCAUCAUC | 714 | 7512 | GAUGAUGAUGUUCCUGAGC | 2466 |
| rs2857790 | 7495 | CUCAGGAACAUCAUCAUCA | 715 | 7495 | CUCAGGAACAUCAUCAUCA | 715 | 7513 | UGAUGAUGAUGUUCCUGAG | 2467 |
| rs2857790 | 7496 | UCAGGAACAUCAUCAUCAG | 716 | 7496 | UCAGGAACAUCAUCAUCAG | 716 | 7514 | CUGAUGAUGAUGUUCCUGA | 2468 |
| rs2857790 | 7497 | CAGGAACAUCAUCAUCAGC | 717 | 7497 | CAGGAACAUCAUCAUCAGC | 717 | 7515 | GCUGAUGAUGAUGUUCCUG | 2469 |
| rs2857790 | 7479 | GUUUCUCACGCCAUUGCUA | 718 | 7479 | GUUUCUCACGCCAUUGCUA | 718 | 7497 | UAGCAAUGGCGUGAGAAAC | 2470 |
| rs2857790 | 7480 | UUUCUCACGCCAUUGCUAA | 719 | 7480 | UUUCUCACGCCAUUGCUAA | 719 | 7498 | UUAGCAAUGGCGUGAGAAA | 2471 |
| rs2857790 | 7481 | UUCUCACGCCAUUGCUAAG | 720 | 7481 | UUCUCACGCCAUUGCUAAG | 720 | 7499 | CUUAGCAAUGGCGUGAGAA | 2472 |
| rs2857790 | 7482 | UCUCACGCCAUUGCUAAGG | 721 | 7482 | UCUCACGCCAUUGCUAAGG | 721 | 7500 | CCUUAGCAAUGGCGUGAGA | 2473 |
| rs2857790 | 7483 | CUCACGCCAUUGCUAAGGA | 722 | 7483 | CUCACGCCAUUGCUAAGGA | 722 | 7501 | UCCUUAGCAAUGGCGUGAG | 2474 |
| rs2857790 | 7484 | UCACGCCAUUGCUAAGGAA | 723 | 7484 | UCACGCCAUUGCUAAGGAA | 723 | 7502 | UUCCUUAGCAAUGGCGUGA | 2475 |
| rs2857790 | 7485 | CACGCCAUUGCUAAGGAAC | 724 | 7485 | CACGCCAUUGCUAAGGAAC | 724 | 7503 | GUUCCUUAGCAAUGGCGUG | 2476 |
| rs2857790 | 7486 | ACGCCAUUGCUAAGGAACA | 725 | 7486 | ACGCCAUUGCUAAGGAACA | 725 | 7504 | UGUUCCUUAGCAAUGGCGU | 2477 |
| rs2857790 | 7487 | CGCCAUUGCUAAGGAACAU | 726 | 7487 | CGCCAUUGCUAAGGAACAU | 726 | 7505 | AUGUUCCUUAGCAAUGGCG | 2478 |
| rs2857790 | 7488 | GCCAUUGCUAAGGAACAUC | 727 | 7488 | GCCAUUGCUAAGGAACAUC | 727 | 7506 | GAUGUUCCUUAGCAAUGGC | 2479 |
| rs2857790 | 7489 | CCAUUGCUAAGGAACAUCA | 728 | 7489 | CCAUUGCUAAGGAACAUCA | 728 | 7507 | UGAUGUUCCUUAGCAAUGG | 2480 |
| rs2857790 | 7490 | CAUUGCUAAGGAACAUCAU | 729 | 7490 | CAUUGCUAAGGAACAUCAU | 729 | 7508 | AUGAUGUUCCUUAGCAAUG | 2481 |
| rs2857790 | 7491 | AUUGCUAAGGAACAUCAUC | 730 | 7491 | AUUGCUAAGGAACAUCAUC | 730 | 7509 | GAUGAUGUUCCUUAGCAAU | 2482 |
| rs2857790 | 7492 | UUGCUAAGGAACAUCAUCA | 731 | 7492 | UUGCUAAGGAACAUCAUCA | 731 | 7510 | UGAUGAUGUUCCUUAGCAA | 2483 |
| rs2857790 | 7493 | UGCUAAGGAACAUCAUCAU | 732 | 7493 | UGCUAAGGAACAUCAUCAU | 732 | 7511 | AUGAUGAUGUUCCUUAGCA | 2484 |
| rs2857790 | 7494 | GCUAAGGAACAUCAUCAUC | 733 | 7494 | GCUAAGGAACAUCAUCAUC | 733 | 7512 | GAUGAUGAUGUUCCUUAGC | 2485 |
| rs2857790 | 7495 | CUAAGGAACAUCAUCAUCA | 734 | 7495 | CUAAGGAACAUCAUCAUCA | 734 | 7513 | UGAUGAUGAUGUUCCUUAG | 2486 |
| rs2857790 | 7496 | UAAGGAACAUCAUCAUCAG | 735 | 7496 | UAAGGAACAUCAUCAUCAG | 735 | 7514 | CUGAUGAUGAUGUUCCUUA | 2487 |
| rs2857790 | 7497 | AAGGAACAUCAUCAUCAGC | 736 | 7497 | AAGGAACAUCAUCAUCAGC | 736 | 7515 | GCUGAUGAUGAUGUUCCUU | 2488 |
| rs362321 | 7665 | GUUCAUCUACCGCAUCAAC | 737 | 7665 | GUUCAUCUACCGCAUCAAC | 737 | 7683 | GUUGAUGCGGUAGAUGAAC | 2489 |
| rs362321 | 7666 | UUCAUCUACCGCAUCAACA | 738 | 7666 | UUCAUCUACCGCAUCAACA | 738 | 7684 | UGUUGAUGCGGUAGAUGAA | 2490 |
| rs362321 | 7667 | UCAUCUACCGCAUCAACAC | 739 | 7667 | UCAUCUACCGCAUCAACAC | 739 | 7685 | GUGUUGAUGCGGUAGAUGA | 2491 |
| rs362321 | 7668 | CAUCUACCGCAUCAACACA | 740 | 7668 | CAUCUACCGCAUCAACACA | 740 | 7686 | UGUGUUGAUGCGGUAGAUG | 2492 |
| rs362321 | 7669 | AUCUACCGCAUCAACACAC | 741 | 7669 | AUCUACCGCAUCAACACAC | 741 | 7687 | GUGUGUUGAUGCGGUAGAU | 2493 |
| rs362321 | 7670 | UCUACCGCAUCAACACACU | 742 | 7670 | UCUACCGCAUCAACACACU | 742 | 7688 | AGUGUGUUGAUGCGGUAGA | 2494 |
| rs362321 | 7671 | CUACCGCAUCAACACACUA | 743 | 7671 | CUACCGCAUCAACACACUA | 743 | 7689 | UAGUGUGUUGAUGCGGUAG | 2495 |
| rs362321 | 7672 | UACCGCAUCAACACACUAG | 744 | 7672 | UACCGCAUCAACACACUAG | 744 | 7690 | CUAGUGUGUUGAUGCGGUA | 2496 |
| rs362321 | 7673 | ACCGCAUCAACACACUAGG | 745 | 7673 | ACCGCAUCAACACACUAGG | 745 | 7691 | CCUAGUGUGUUGAUGCGGU | 2497 |
| rs362321 | 7674 | CCGCAUCAACACACUAGGC | 746 | 7674 | CCGCAUCAACACACUAGGC | 746 | 7692 | GCCUAGUGUGUUGAUGCGG | 2498 |
| rs362321 | 7675 | CGCAUCAACACACUAGGCU | 747 | 7675 | CGCAUCAACACACUAGGCU | 747 | 7693 | AGCCUAGUGUGUUGAUGCG | 2499 |
| rs362321 | 7676 | GCAUCAACACACUAGGCUG | 748 | 7676 | GCAUCAACACACUAGGCUG | 748 | 7694 | CAGCCUAGUGUGUUGAUGC | 2500 |
| rs362321 | 7677 | CAUCAACACACUAGGCUGG | 749 | 7677 | CAUCAACACACUAGGCUGG | 749 | 7695 | CCAGCCUAGUGUGUUGAUG | 2501 |
| rs362321 | 7678 | AUCAACACACUAGGCUGGA | 750 | 7678 | AUCAACACACUAGGCUGGA | 750 | 7696 | UCCAGCCUAGUGUGUUGAU | 2502 |
| rs362321 | 7679 | UCAACACACUAGGCUGGAC | 751 | 7679 | UCAACACACUAGGCUGGAC | 751 | 7697 | GUCCAGCCUAGUGUGUUGA | 2503 |
| rs362321 | 7680 | CAACACACUAGGCUGGACC | 752 | 7680 | CAACACACUAGGCUGGACC | 752 | 7698 | GGUCCAGCCUAGUGUGUUG | 2504 |
| rs362321 | 7681 | AACACACUAGGCUGGACCA | 753 | 7681 | AACACACUAGGCUGGACCA | 753 | 7699 | UGGUCCAGCCUAGUGUGUU | 2505 |
| rs362321 | 7682 | ACACACUAGGCUGGACCAG | 754 | 7682 | ACACACUAGGCUGGACCAG | 754 | 7700 | CUGGUCCAGCCUAGUGUGU | 2506 |
| rs362321 | 7683 | CACACUAGGCUGGACCAGU | 755 | 7683 | CACACUAGGCUGGACCAGU | 755 | 7701 | ACUGGUCCAGCCUAGUGUG | 2507 |
| rs362321 | 7665 | GUUCAUCUACCGCAUCAAU | 756 | 7665 | GUUCAUCUACCGCAUCAAU | 756 | 7683 | AUUGAUGCGGUAGAUGAAC | 2508 |
| rs362321 | 7666 | UUCAUCUACCGCAUCAAUA | 757 | 7666 | UUCAUCUACCGCAUCAAUA | 757 | 7684 | UAUUGAUGCGGUAGAUGAA | 2509 |
| rs362321 | 7667 | UCAUCUACCGCAUCAAUAC | 758 | 7667 | UCAUCUACCGCAUCAAUAC | 758 | 7685 | GUAUUGAUGCGGUAGAUGA | 2510 |
| rs362321 | 7668 | CAUCUACCGCAUCAAUACA | 759 | 7668 | CAUCUACCGCAUCAAUACA | 759 | 7686 | UGUAUUGAUGCGGUAGAUG | 2511 |
| rs362321 | 7669 | AUCUACCGCAUCAAUACAC | 760 | 7669 | AUCUACCGCAUCAAUACAC | 760 | 7687 | GUGUAUUGAUGCGGUAGAU | 2512 |
| rs362321 | 7670 | UCUACCGCAUCAAUACACU | 761 | 7670 | UCUACCGCAUCAAUACACU | 761 | 7688 | AGUGUAUUGAUGCGGUAGA | 2513 |
| rs362321 | 7671 | CUACCGCAUCAAUACACUA | 762 | 7671 | CUACCGCAUCAAUACACUA | 762 | 7689 | UAGUGUAUUGAUGCGGUAG | 2514 |
| rs362321 | 7672 | UACCGCAUCAAUACACUAG | 763 | 7672 | UACCGCAUCAAUACACUAG | 763 | 7690 | CUAGUGUAUUGAUGCGGUA | 2515 |
| rs362321 | 7673 | ACCGCAUCAAUACACUAGG | 764 | 7673 | ACCGCAUCAAUACACUAGG | 764 | 7691 | CCUAGUGUAUUGAUGCGGU | 2516 |
| rs362321 | 7674 | CCGCAUCAAUACACUAGGC | 765 | 7674 | CCGCAUCAAUACACUAGGC | 765 | 7692 | GCCUAGUGUAUUGAUGCGG | 2517 |
| rs362321 | 7675 | CGCAUCAAUACACUAGGCU | 766 | 7675 | CGCAUCAAUACACUAGGCU | 766 | 7693 | AGCCUAGUGUAUUGAUGCG | 2518 |
| rs362321 | 7676 | GCAUCAAUACACUAGGCUG | 767 | 7676 | GCAUCAAUACACUAGGCUG | 767 | 7694 | CAGCCUAGUGUAUUGAUGC | 2519 |
| rs362321 | 7677 | CAUCAAUACACUAGGCUGG | 768 | 7677 | CAUCAAUACACUAGGCUGG | 768 | 7695 | CCAGCCUAGUGUAUUGAUG | 2520 |
| rs362321 | 7678 | AUCAAUACACUAGGCUGGA | 769 | 7678 | AUCAAUACACUAGGCUGGA | 769 | 7696 | UCCAGCCUAGUGUAUUGAU | 2521 |
| rs362321 | 7679 | UCAAUACACUAGGCUGGAC | 770 | 7679 | UCAAUACACUAGGCUGGAC | 770 | 7697 | GUCCAGCCUAGUGUAUUGA | 2522 |
| rs362321 | 7680 | CAAUACACUAGGCUGGACC | 771 | 7680 | CAAUACACUAGGCUGGACC | 771 | 7698 | GGUCCAGCCUAGUGUAUUG | 2523 |
| rs362321 | 7681 | AAUACACUAGGCUGGACCA | 772 | 7681 | AAUACACUAGGCUGGACCA | 772 | 7699 | UGGUCCAGCCUAGUGUAUU | 2524 |
| rs362321 | 7682 | AUACACUAGGCUGGACCAG | 773 | 7682 | AUACACUAGGCUGGACCAG | 773 | 7700 | CUGGUCCAGCCUAGUGUAU | 2525 |
| rs362321 | 7683 | UACACUAGGCUGGACCAGU | 774 | 7683 | UACACUAGGCUGGACCAGU | 774 | 7701 | ACUGGUCCAGCCUAGUGUA | 2526 |
| rs3025816 | 7735 | CUUGGUGUCCUGGUGACGC | 775 | 7735 | CUUGGUGUCCUGGUGACGC | 775 | 7753 | GCGUCACCAGGACACCAAG | 2527 |
| rs3025816 | 7736 | UUGGUGUCCUGGUGACGCA | 776 | 7736 | UUGGUGUCCUGGUGACGCA | 776 | 7754 | UGCGUCACCAGGACACCAA | 2528 |
| rs3025816 | 7737 | UGGUGUCCUGGUGACGCAG | 777 | 7737 | UGGUGUCCUGGUGACGCAG | 777 | 7755 | CUGCGUCACCAGGACACCA | 2529 |
| rs3025816 | 7738 | GGUGUCCUGGUGACGCAGC | 778 | 7738 | GGUGUCCUGGUGACGCAGC | 778 | 7756 | GCUGCGUCACCAGGACACC | 2530 |
| rs3025816 | 7739 | GUGUCCUGGUGACGCAGCC | 779 | 7739 | GUGUCCUGGUGACGCAGCC | 779 | 7757 | GGCUGCGUCACCAGGACAC | 2531 |
| rs3025816 | 7740 | UGUCCUGGUGACGCAGCCC | 780 | 7740 | UGUCCUGGUGACGCAGCCC | 780 | 7758 | GGGCUGCGUCACCAGGACA | 2532 |
| rs3025816 | 7741 | GUCCUGGUGACGCAGCCCC | 781 | 7741 | GUCCUGGUGACGCAGCCCC | 781 | 7759 | GGGGCUGCGUCACCAGGAC | 2533 |
| rs3025816 | 7742 | UCCUGGUGACGCAGCCCCU | 782 | 7742 | UCCUGGUGACGCAGCCCCU | 782 | 7760 | AGGGGCUGCGUCACCAGGA | 2534 |
| rs3025816 | 7743 | CCUGGUGACGCAGCCCCUC | 783 | 7743 | CCUGGUGACGCAGCCCCUC | 783 | 7761 | GAGGGGCUGCGUCACCAGG | 2535 |
| rs3025816 | 7744 | CUGGUGACGCAGCCCCUCG | 784 | 7744 | CUGGUGACGCAGCCCCUCG | 784 | 7762 | CGAGGGGCUGCGUCACCAG | 2536 |
| rs3025816 | 7745 | UGGUGACGCAGCCCCUCGU | 785 | 7745 | UGGUGACGCAGCCCCUCGU | 785 | 7763 | ACGAGGGGCUGCGUCACCA | 2537 |
| rs3025816 | 7746 | GGUGACGCAGCCCCUCGUG | 786 | 7746 | GGUGACGCAGCCCCUCGUG | 786 | 7764 | CACGAGGGGCUGCGUCACC | 2538 |
| rs3025816 | 7747 | GUGACGCAGCCCCUCGUGA | 787 | 7747 | GUGACGCAGCCCCUCGUGA | 787 | 7765 | UCACGAGGGGCUGCGUCAC | 2539 |
| rs3025816 | 7748 | UGACGCAGCCCCUCGUGAU | 788 | 7748 | UGACGCAGCCCCUCGUGAU | 788 | 7766 | AUCACGAGGGGCUGCGUCA | 2540 |
| rs3025816 | 7749 | GACGCAGCCCCUCGUGAUG | 789 | 7749 | GACGCAGCCCCUCGUGAUG | 789 | 7767 | CAUCACGAGGGGCUGCGUC | 2541 |
| rs3025816 | 7750 | ACGCAGCCCCUCGUGAUGG | 790 | 7750 | ACGCAGCCCCUCGUGAUGG | 790 | 7768 | CCAUCACGAGGGGCUGCGU | 2542 |
| rs3025816 | 7751 | CGCAGCCCCUCGUGAUGGA | 791 | 7751 | CGCAGCCCCUCGUGAUGGA | 791 | 7769 | UCCAUCACGAGGGGCUGCG | 2543 |
| rs3025816 | 7752 | GCAGCCCCUCGUGAUGGAG | 792 | 7752 | GCAGCCCCUCGUGAUGGAG | 792 | 7770 | CUCCAUCACGAGGGGCUGC | 2544 |
| rs3025816 | 7753 | CAGCCCCUCGUGAUGGAGC | 793 | 7753 | CAGCCCCUCGUGAUGGAGC | 793 | 7771 | GCUCCAUCACGAGGGGCUG | 2545 |
| rs3025816 | 7735 | CUUGGUGUCCUGGUGACGU | 794 | 7735 | CUUGGUGUCCUGGUGACGU | 794 | 7753 | ACGUCACCAGGACACCAAG | 2546 |
| rs3025816 | 7736 | UUGGUGUCCUGGUGACGUA | 795 | 7736 | UUGGUGUCCUGGUGACGUA | 795 | 7754 | UACGUCACCAGGACACCAA | 2547 |
| rs3025816 | 7737 | UGGUGUCCUGGUGACGUAG | 796 | 7737 | UGGUGUCCUGGUGACGUAG | 796 | 7755 | CUACGUCACCAGGACACCA | 2548 |
| rs3025816 | 7738 | GGUGUCCUGGUGACGUAGC | 797 | 7738 | GGUGUCCUGGUGACGUAGC | 797 | 7756 | GCUACGUCACCAGGACACC | 2549 |
| rs3025816 | 7739 | GUGUCCUGGUGACGUAGCC | 798 | 7739 | GUGUCCUGGUGACGUAGCC | 798 | 7757 | GGCUACGUCACCAGGACAC | 2550 |
| rs3025816 | 7740 | UGUCCUGGUGACGUAGCCC | 799 | 7740 | UGUCCUGGUGACGUAGCCC | 799 | 7758 | GGGCUACGUCACCAGGACA | 2551 |
| rs3025816 | 7741 | GUCCUGGUGACGUAGCCCC | 800 | 7741 | GUCCUGGUGACGUAGCCCC | 800 | 7759 | GGGGCUACGUCACCAGGAC | 2552 |
| rs3025816 | 7742 | UCCUGGUGACGUAGCCCCU | 801 | 7742 | UCCUGGUGACGUAGCCCCU | 801 | 7760 | AGGGGCUACGUCACCAGGA | 2553 |
| rs3025816 | 7743 | CCUGGUGACGUAGCCCCUC | 802 | 7743 | CCUGGUGACGUAGCCCCUC | 802 | 7761 | GAGGGGCUACGUCACCAGG | 2554 |
| rs3025816 | 7744 | CUGGUGACGUAGCCCCUCG | 803 | 7744 | CUGGUGACGUAGCCCCUCG | 803 | 7762 | CGAGGGGCUACGUCACCAG | 2555 |
| rs3025816 | 7745 | UGGUGACGUAGCCCCUCGU | 804 | 7745 | UGGUGACGUAGCCCCUCGU | 804 | 7763 | ACGAGGGGCUACGUCACCA | 2556 |
| rs3025816 | 7746 | GGUGACGUAGCCCCUCGUG | 805 | 7746 | GGUGACGUAGCCCCUCGUG | 805 | 7764 | CACGAGGGGCUACGUCACC | 2557 |
| rs3025816 | 7747 | GUGACGUAGCCCCUCGUGA | 806 | 7747 | GUGACGUAGCCCCUCGUGA | 806 | 7765 | UCACGAGGGGCUACGUCAC | 2558 |
| rs3025816 | 7748 | UGACGUAGCCCCUCGUGAU | 807 | 7748 | UGACGUAGCCCCUCGUGAU | 807 | 7766 | AUCACGAGGGGCUACGUCA | 2559 |
| rs3025816 | 7749 | GACGUAGCCCCUCGUGAUG | 808 | 7749 | GACGUAGCCCCUCGUGAUG | 808 | 7767 | CAUCACGAGGGGCUACGUC | 2560 |
| rs3025816 | 7750 | ACGUAGCCCCUCGUGAUGG | 809 | 7750 | ACGUAGCCCCUCGUGAUGG | 809 | 7768 | CCAUCACGAGGGGCUACGU | 2561 |
| rs3025816 | 7751 | CGUAGCCCCUCGUGAUGGA | 810 | 7751 | CGUAGCCCCUCGUGAUGGA | 810 | 7769 | UCCAUCACGAGGGGCUACG | 2562 |
| rs3025816 | 7752 | GUAGCCCCUCGUGAUGGAG | 811 | 7752 | GUAGCCCCUCGUGAUGGAG | 811 | 7770 | CUCCAUCACGAGGGGCUAC | 2563 |
| rs3025816 | 7753 | UAGCCCCUCGUGAUGGAGC | 812 | 7753 | UAGCCCCUCGUGAUGGAGC | 812 | 7771 | GCUCCAUCACGAGGGGCUA | 2564 |
| rs3025814 | 7831 | CAGGCCAUCACCUCACUGG | 813 | 7831 | CAGGCCAUCACCUCACUGG | 813 | 7849 | CCAGUGAGGUGAUGGCCUG | 2565 |
| rs3025814 | 7832 | AGGCCAUCACCUCACUGGU | 814 | 7832 | AGGCCAUCACCUCACUGGU | 814 | 7850 | ACCAGUGAGGUGAUGGCCU | 2566 |
| rs3025814 | 7833 | GGCCAUCACCUCACUGGUG | 815 | 7833 | GGCCAUCACCUCACUGGUG | 815 | 7851 | CACCAGUGAGGUGAUGGCC | 2567 |
| rs3025814 | 7834 | GCCAUCACCUCACUGGUGC | 816 | 7834 | GCCAUCACCUCACUGGUGC | 816 | 7852 | GCACCAGUGAGGUGAUGGC | 2568 |
| rs3025814 | 7835 | CCAUCACCUCACUGGUGCU | 817 | 7835 | CCAUCACCUCACUGGUGCU | 817 | 7853 | AGCACCAGUGAGGUGAUGG | 2569 |
| rs3025814 | 7836 | CAUCACCUCACUGGUGCUC | 818 | 7836 | CAUCACCUCACUGGUGCUC | 818 | 7854 | GAGCACCAGUGAGGUGAUG | 2570 |
| rs3025814 | 7837 | AUCACCUCACUGGUGCUCA | 819 | 7837 | AUCACCUCACUGGUGCUCA | 819 | 7855 | UGAGCACCAGUGAGGUGAU | 2571 |
| rs3025814 | 7838 | UCACCUCACUGGUGCUCAG | 820 | 7838 | UCACCUCACUGGUGCUCAG | 820 | 7856 | CUGAGCACCAGUGAGGUGA | 2572 |
| rs3025814 | 7839 | CACCUCACUGGUGCUCAGU | 821 | 7839 | CACCUCACUGGUGCUCAGU | 821 | 7857 | ACUGAGCACCAGUGAGGUG | 2573 |
| rs3025814 | 7840 | ACCUCACUGGUGCUCAGUG | 822 | 7840 | ACCUCACUGGUGCUCAGUG | 822 | 7858 | CACUGAGCACCAGUGAGGU | 2574 |
| rs3025814 | 7841 | CCUCACUGGUGCUCAGUGC | 823 | 7841 | CCUCACUGGUGCUCAGUGC | 823 | 7859 | GCACUGAGCACCAGUGAGG | 2575 |
| rs3025814 | 7842 | CUCACUGGUGCUCAGUGCA | 824 | 7842 | CUCACUGGUGCUCAGUGCA | 824 | 7860 | UGCACUGAGCACCAGUGAG | 2576 |
| rs3025814 | 7843 | UCACUGGUGCUCAGUGCAA | 825 | 7843 | UCACUGGUGCUCAGUGCAA | 825 | 7861 | UUGCACUGAGCACCAGUGA | 2577 |
| rs3025814 | 7844 | CACUGGUGCUCAGUGCAAU | 826 | 7844 | CACUGGUGCUCAGUGCAAU | 826 | 7862 | AUUGCACUGAGCACCAGUG | 2578 |
| rs3025814 | 7845 | ACUGGUGCUCAGUGCAAUG | 827 | 7845 | ACUGGUGCUCAGUGCAAUG | 827 | 7863 | CAUUGCACUGAGCACCAGU | 2579 |
| rs3025814 | 7846 | CUGGUGCUCAGUGCAAUGA | 828 | 7846 | CUGGUGCUCAGUGCAAUGA | 828 | 7864 | UCAUUGCACUGAGCACCAG | 2580 |
| rs3025814 | 7847 | UGGUGCUCAGUGCAAUGAC | 829 | 7847 | UGGUGCUCAGUGCAAUGAC | 829 | 7865 | GUCAUUGCACUGAGCACCA | 2581 |
| rs3025814 | 7848 | GGUGCUCAGUGCAAUGACU | 830 | 7848 | GGUGCUCAGUGCAAUGACU | 830 | 7866 | AGUCAUUGCACUGAGCACC | 2582 |
| rs3025814 | 7849 | GUGCUCAGUGCAAUGACUG | 831 | 7849 | GUGCUCAGUGCAAUGACUG | 831 | 7867 | CAGUCAUUGCACUGAGCAC | 2583 |
| rs3025814 | 7831 | CAGGCCAUCACCUCACUGC | 832 | 7831 | CAGGCCAUCACCUCACUGC | 832 | 7849 | GCAGUGAGGUGAUGGCCUG | 2584 |
| rs3025814 | 7832 | AGGCCAUCACCUCACUGCU | 833 | 7832 | AGGCCAUCACCUCACUGCU | 833 | 7850 | AGCAGUGAGGUGAUGGCCU | 2585 |
| rs3025814 | 7833 | GGCCAUCACCUCACUGCUG | 834 | 7833 | GGCCAUCACCUCACUGCUG | 834 | 7851 | CAGCAGUGAGGUGAUGGCC | 2586 |
| rs3025814 | 7834 | GCCAUCACCUCACUGCUGC | 835 | 7834 | GCCAUCACCUCACUGCUGC | 835 | 7852 | GCAGCAGUGAGGUGAUGGC | 2587 |
| rs3025814 | 7835 | CCAUCACCUCACUGCUGCU | 836 | 7835 | CCAUCACCUCACUGCUGCU | 836 | 7853 | AGCAGCAGUGAGGUGAUGG | 2588 |
| rs3025814 | 7836 | CAUCACCUCACUGCUGCUC | 837 | 7836 | CAUCACCUCACUGCUGCUC | 837 | 7854 | GAGCAGCAGUGAGGUGAUG | 2589 |
| rs3025814 | 7837 | AUCACCUCACUGCUGCUCA | 838 | 7837 | AUCACCUCACUGCUGCUCA | 838 | 7855 | UGAGCAGCAGUGAGGUGAU | 2590 |
| rs3025814 | 7838 | UCACCUCACUGCUGCUCAG | 839 | 7838 | UCACCUCACUGCUGCUCAG | 839 | 7856 | CUGAGCAGCAGUGAGGUGA | 2591 |
| rs3025814 | 7839 | CACCUCACUGCUGCUCAGU | 840 | 7839 | CACCUCACUGCUGCUCAGU | 840 | 7857 | ACUGAGCAGCAGUGAGGUG | 2592 |
| rs3025814 | 7840 | ACCUCACUGCUGCUCAGUG | 841 | 7840 | ACCUCACUGCUGCUCAGUG | 841 | 7858 | CACUGAGCAGCAGUGAGGU | 2593 |
| rs3025814 | 7841 | CCUCACUGCUGCUCAGUGC | 842 | 7841 | CCUCACUGCUGCUCAGUGC | 842 | 7859 | GCACUGAGCAGCAGUGAGG | 2594 |
| rs3025814 | 7842 | CUCACUGCUGCUCAGUGCA | 843 | 7842 | CUCACUGCUGCUCAGUGCA | 843 | 7860 | UGCACUGAGCAGCAGUGAG | 2595 |
| rs3025814 | 7843 | UCACUGCUGCUCAGUGCAA | 844 | 7843 | UCACUGCUGCUCAGUGCAA | 844 | 7861 | UUGCACUGAGCAGCAGUGA | 2596 |
| rs3025814 | 7844 | CACUGCUGCUCAGUGCAAU | 845 | 7844 | CACUGCUGCUCAGUGCAAU | 845 | 7862 | AUUGCACUGAGCAGCAGUG | 2597 |
| rs3025814 | 7845 | ACUGCUGCUCAGUGCAAUG | 846 | 7845 | ACUGCUGCUCAGUGCAAUG | 846 | 7863 | CAUUGCACUGAGCAGCAGU | 2598 |
| rs3025814 | 7846 | CUGCUGCUCAGUGCAAUGA | 847 | 7846 | CUGCUGCUCAGUGCAAUGA | 847 | 7864 | UCAUUGCACUGAGCAGCAG | 2599 |
| rs3025814 | 7847 | UGCUGCUCAGUGCAAUGAC | 848 | 7847 | UGCUGCUCAGUGCAAUGAC | 848 | 7865 | GUCAUUGCACUGAGCAGCA | 2600 |
| rs3025814 | 7848 | GCUGCUCAGUGCAAUGACU | 849 | 7848 | GCUGCUCAGUGCAAUGACU | 849 | 7866 | AGUCAUUGCACUGAGCAGC | 2601 |
| rs3025814 | 7849 | CUGCUCAGUGCAAUGACUG | 850 | 7849 | CUGCUCAGUGCkAUGACUG | 850 | 7867 | CAGUCAUUGCACUGAGCAG | 2602 |
| rs362273 | 8100 | CCACGAGAAGCUGCUGCUA | 851 | 8100 | CCACGAGAAGCUGCUGCUA | 851 | 8118 | UAGCAGCAGCUUCUCGUGG | 2603 |
| rs362273 | 8101 | CACGAGAAGCUGCUGCUAC | 852 | 8101 | CACGAGAAGCUGCUGCUAC | 852 | 8119 | GUAGCAGCAGCUUCUCGUG | 2604 |
| rs362273 | 8102 | ACGAGAAGCUGCUGCUACA | 853 | 8102 | ACGAGAAGCUGCUGCUACA | 853 | 8120 | UGUAGCAGCAGCUUCUCGU | 2605 |
| rs362273 | 8103 | CGAGAAGCUGCUGCUACAG | 854 | 8103 | CGAGAAGCUGCUGCUACAG | 854 | 8121 | CUGUAGCAGCAGCUUCUCG | 2606 |
| rs362273 | 8104 | GAGAAGCUGCUGCUACAGA | 855 | 8104 | GAGAAGCUGCUGCUACAGA | 855 | 8122 | UCUGUAGCAGCAGCUUCUC | 2607 |
| rs362273 | 8105 | AGAAGCUGCUGCUACAGAU | 856 | 8105 | AGAAGCUGCUGCUACAGAU | 856 | 8123 | AUCUGUAGCAGCAGCUUCU | 2608 |
| rs362273 | 8106 | GAAGCUGCUGCUACAGAUC | 857 | 8106 | GAAGCUGCUGCUACAGAUC | 857 | 8124 | GAUCUGUAGCAGCAGCUUC | 2609 |
| rs362273 | 8107 | AAGCUGCUGCUACAGAUCA | 858 | 8107 | AAGCUGCUGCUACAGAUCA | 858 | 8125 | UGAUCUGUAGCAGCAGCUU | 2610 |
| rs362273 | 8108 | AGCUGCUGCUACAGAUCAA | 859 | 8108 | AGCUGCUGCUACAGAUCAA | 859 | 8126 | UUGAUCUGUAGCAGCAGCU | 2611 |
| rs362273 | 8109 | GCUGCUGCUACAGAUCAAC | 860 | 8109 | GCUGCUGCUACAGAUCAAC | 860 | 8127 | GUUGAUCUGUAGCAGCAGC | 2612 |
| rs362273 | 8110 | CUGCUGCUACAGAUCAACC | 861 | 8110 | CUGCUGCUACAGAUCAACC | 861 | 8128 | GGUUGAUCUGUAGCAGCAG | 2613 |
| rs362273 | 8111 | UGCUGCUACAGAUCAACCC | 862 | 8111 | UGCUGCUACAGAUCAACCC | 862 | 8129 | GGGUUGAUCUGUAGCAGCA | 2614 |
| rs362273 | 8112 | GCUGCUACAGAUCAACCCC | 863 | 8112 | GCUGCUACAGAUCAACCCC | 863 | 8130 | GGGGUUGAUCUGUAGCAGC | 2615 |
| rs362273 | 8113 | CUGCUACAGAUCAACCCCG | 864 | 8113 | CUGCUACAGAUCAACCCCG | 864 | 8131 | CGGGGUUGAUCUGUAGCAG | 2616 |
| rs362273 | 8114 | UGCUACAGAUCAACCCCGA | 865 | 8114 | UGCUACAGAUCAACCCCGA | 865 | 8132 | UCGGGGUUGAUCUGUAGCA | 2617 |
| rs362273 | 8115 | GCUACAGAUCAACCCCGAG | 866 | 8115 | GCUACAGAUCAACCCCGAG | 866 | 8133 | CUCGGGGUUGAUCUGUAGC | 2618 |
| rs362273 | 8116 | CUACAGAUCAACCCCGAGC | 867 | 8116 | CUACAGAUCAACCCCGAGC | 867 | 8134 | GCUCGGGGUUGAUCUGUAG | 2619 |
| rs362273 | 8117 | UACAGAUCAACCCCGAGCG | 868 | 8117 | UACAGAUCAACCCCGAGCG | 868 | 8135 | CGCUCGGGGUUGAUCUGUA | 2620 |
| rs362273 | 8118 | ACAGAUCAACCCCGAGCGG | 869 | 8118 | ACAGAUCAACCCCGAGCGG | 869 | 8136 | CCGCUCGGGGUUGAUCUGU | 2621 |
| rs362273 | 8100 | CCACGAGAAGCUGCUGCUG | 870 | 8100 | CCACGAGAAGCUGCUGCUG | 870 | 8118 | CAGCAGCAGCUUCUCGUGG | 2622 |
| rs362273 | 8101 | CACGAGAAGCUGCUGCUGC | 871 | 8101 | CACGAGAAGCUGCUGCUGC | 871 | 8119 | GCAGCAGCAGCUUCUCGUG | 2623 |
| rs362273 | 8102 | ACGAGAAGCUGCUGCUGCA | 872 | 8102 | ACGAGAAGCUGCUGCUGCA | 872 | 8120 | UGCAGCAGCAGCUUCUCGU | 2624 |
| rs362273 | 8103 | CGAGAAGCUGCUGCUGCAG | 873 | 8103 | CGAGAAGCUGCUGCUGCAG | 873 | 8121 | CUGCAGCAGCAGCUUCUCG | 2625 |
| rs362273 | 8104 | GAGAAGCUGCUGCUGCAGA | 874 | 8104 | GAGAAGCUGCUGCUGCAGA | 874 | 8122 | UCUGCAGCAGCAGCUUCUC | 2626 |
| rs362273 | 8105 | AGAAGCUGCUGCUGCAGAU | 875 | 8105 | AGAAGCUGCUGCUGCAGAU | 875 | 8123 | AUCUGCAGCAGCAGCUUCU | 2627 |
| rs362273 | 8106 | GAAGCUGCUGCUGCAGAUC | 876 | 8106 | GAAGCUGCUGCUGCAGAUC | 876 | 8124 | GAUCUGCAGCAGCAGCUUC | 2628 |
| rs362273 | 8107 | AAGCUGCUGCUGCAGAUCA | 877 | 8107 | AAGCUGCUGCUGCAGAUCA | 877 | 8125 | UGAUCUGCAGCAGCAGCUU | 2629 |
| rs362273 | 8108 | AGCUGCUGCUGCAGAUCAA | 878 | 8108 | AGCUGCUGCUGCAGAUCAA | 878 | 8126 | UUGAUCUGCAGCAGCAGCU | 2630 |
| rs362273 | 8109 | GCUGCUGCUGCAGAUCAAC | 879 | 8109 | GCUGCUGCUGCAGAUCAAC | 879 | 8127 | GUUGAUCUGCAGCAGCAGC | 2631 |
| rs362273 | 8110 | CUGCUGCUGCAGAUCAACC | 880 | 8110 | CUGCUGCUGCAGAUCAACC | 880 | 8128 | GGUUGAUCUGCAGCAGCAG | 2632 |
| rs362273 | 8111 | UGCUGCUGCAGAUCAACCC | 881 | 8111 | UGCUGCUGCAGAUCAACCC | 881 | 8129 | GGGUUGAUCUGCAGCAGCA | 2633 |
| rs362273 | 8112 | GCUGCUGCAGAUCAACCCC | 882 | 8112 | GCUGCUGCAGAUCAACCCC | 882 | 8130 | GGGGUUGAUCUGCAGCAGC | 2634 |
| rs362273 | 8113 | CUGCUGCAGAUCAACCCCG | 883 | 8113 | CUGCUGCAGAUCAACCCCG | 883 | 8131 | CGGGGUUGAUCUGCAGCAG | 2635 |
| rs362273 | 8114 | UGCUGCAGAUCAACCCCGA | 884 | 8114 | UGCUGCAGAUCAACCCCGA | 884 | 8132 | UCGGGGUUGAUCUGCAGCA | 2636 |
| rs362273 | 8115 | GCUGCAGAUCAACCCCGAG | 885 | 8115 | GCUGCAGAUCAACCCCGAG | 885 | 8133 | CUCGGGGUUGAUCUGCAGC | 2637 |
| rs362273 | 8116 | CUGCAGAUCAACCCCGAGC | 886 | 8116 | CUGCAGAUCAACCCCGAGC | 886 | 8134 | GCUCGGGGUUGAUCUGCAG | 2638 |
| rs362273 | 8117 | UGCAGAUCAACCCCGAGCG | 887 | 8117 | UGCAGAUCAACCCCGAGCG | 887 | 8135 | CGCUCGGGGUUGAUCUGCA | 2639 |
| rs362273 | 8118 | GCAGAUCAACCCCGAGCGG | 888 | 8118 | GCAGAUCAACCCCGAGCGG | 888 | 8136 | CCGCUCGGGGUUGAUCUGC | 2640 |
| HD-Ex58 | 8231 | ACGAGGAAGAGGAGGAGGA | 889 | 8231 | ACGAGGAAGAGGAGGAGGA | 889 | 8249 | UCCUCCUCCUCUUCCUCGU | 2641 |
| HD-Ex58 | 8232 | CGAGGAAGAGGAGGAGGAG | 890 | 8232 | CGAGGAAGAGGAGGAGGAG | 890 | 8250 | CUCCUCCUCCUCUUCCUCG | 2642 |
| HD-Ex58 | 8233 | GAGGAAGAGGAGGAGGAGG | 891 | 8233 | GAGGAAGAGGAGGAGGAGG | 891 | 8251 | CCUCCUCCUCCUCUUCCUC | 2643 |
| HD-Ex58 | 8234 | AGGAAGAGGAGGAGGAGGC | 892 | 8234 | AGGAAGAGGAGGAGGAGGC | 892 | 8252 | GCCUCCUCCUCCUCUUCCU | 2644 |
| HD-Ex58 | 8235 | GGAAGAGGAGGAGGAGGCC | 893 | 8235 | GGAAGAGGAGGAGGAGGCC | 893 | 8253 | GGCCUCCUCCUCCUCUUCC | 2645 |
| HD-Ex58 | 8236 | GAAGAGGAGGAGGAGGCCG | 894 | 8236 | GAAGAGGAGGAGGAGGCCG | 894 | 8254 | CGGCCUCCUCCUCCUCUUC | 2646 |
| HD-Ex58 | 8237 | AAGAGGAGGAGGAGGCCGA | 895 | 8237 | AAGAGGAGGAGGAGGCCGA | 895 | 8255 | UCGGCCUCCUCCUCCUCUU | 2647 |
| HD-Ex58 | 8238 | AGAGGAGGAGGAGGCCGAC | 896 | 8238 | AGAGGAGGAGGAGGCCGAC | 896 | 8256 | GUCGGCCUCCUCCUCCUCU | 2648 |
| HD-Ex58 | 8239 | GAGGAGGAGGAGGCCGACG | 897 | 8239 | GAGGAGGAGGAGGCCGACG | 897 | 8257 | CGUCGGCCUCCUCCUCCUC | 2649 |
| HD-Ex58 | 8240 | AGGAGGAGGAGGCCGACGC | 898 | 8240 | AGGAGGAGGAGGCCGACGC | 898 | 8258 | GCGUCGGCCUCCUCCUCCU | 2650 |
| HD-Ex58 | 8241 | GGAGGAGGAGGCCGACGCC | 899 | 8241 | GGAGGAGGAGGCCGACGCC | 899 | 8259 | GGCGUCGGCCUCCUCCUCC | 2651 |
| HD-Ex58 | 8231 | ACGAGGAAGAGGAGGAGGC | 900 | 8231 | ACGAGGAAGAGGAGGAGGC | 900 | 8249 | GCCUCCUCCUCUUCCUCGU | 2652 |
| HD-Ex58 | 8232 | CGAGGAAGAGGAGGAGGCC | 901 | 8232 | CGAGGAAGAGGAGGAGGCC | 901 | 8250 | GGCCUCCUCCUCUUCCUCG | 2653 |
| HD-Ex58 | 8233 | GAGGAAGAGGAGGAGGCCG | 902 | 8233 | GAGGAAGAGGAGGAGGCCG | 902 | 8251 | CGGCCUCCUCCUCUUCCUC | 2654 |
| HD-Ex58 | 8234 | AGGAAGAGGAGGAGGCCGA | 903 | 8234 | AGGAAGAGGAGGAGGCCGA | 903 | 8252 | UCGGCCUCCUCCUCUUCCU | 2655 |
| HD-Ex58 | 8235 | GGAAGAGGAGGAGGCCGAC | 904 | 8235 | GGAAGAGGAGGAGGCCGAC | 904 | 8253 | GUCGGCCUCCUCCUCUUCC | 2656 |
| HD-Ex58 | 8236 | GAAGAGGAGGAGGCCGACG | 905 | 8236 | GAAGAGGAGGAGGCCGACG | 905 | 8254 | CGUCGGCCUCCUCCUCUUC | 2657 |
| HD-Ex58 | 8237 | AAGAGGAGGAGGCCGACGC | 906 | 8237 | AAGAGGAGGAGGCCGACGC | 906 | 8255 | GCGUCGGCCUCCUCCUCUU | 2658 |
| HD-Ex58 | 8238 | AGAGGAGGAGGCCGACGCC | 907 | 8238 | AGAGGAGGAGGCCGACGCC | 907 | 8256 | GGCGUCGGCCUCCUCCUCU | 2659 |
| rs2276881 | 8460 | GCGCAACCAGUUUGAGCUG | 908 | 8460 | GCGCAACCAGUUUGAGCUG | 908 | 8478 | CAGCUCAAACUGGUUGCGC | 2660 |
| rs2276881 | 8461 | CGCAACCAGUUUGAGCUGA | 909 | 8461 | CGCAACCAGUUUGAGCUGA | 909 | 8479 | UCAGCUCAAACUGGUUGCG | 2661 |
| rs2276881 | 8462 | GCAACCAGUUUGAGCUGAU | 910 | 8462 | GCAACCAGUUUGAGCUGAU | 910 | 8480 | AUCAGCUCAAACUGGUUGC | 2662 |
| rs2276881 | 8463 | CAACCAGUUUGAGCUGAUG | 911 | 8463 | CAACCAGUUUGAGCUGAUG | 911 | 8481 | CAUCAGCUCAAACUGGUUG | 2663 |
| rs2276881 | 8464 | AACCAGUUUGAGCUGAUGU | 912 | 8464 | AACCAGUUUGAGCUGAUGU | 912 | 8482 | ACAUCAGCUCAAACUGGUU | 2664 |
| rs2276881 | 8465 | ACCAGUUUGAGCUGAUGUA | 913 | 8465 | ACCAGUUUGAGCUGAUGUA | 913 | 8483 | UACAUCAGCUCPAACUGGU | 2665 |
| rs2276881 | 8466 | CCAGUUUGAGCUGAUGUAU | 914 | 8466 | CCAGUUUGAGCUGAUGUAU | 914 | 8484 | AUACAUCAGCUCAAACUGG | 2666 |
| rs2276881 | 8467 | CAGUUUGAGCUGAUGUAUG | 915 | 8467 | CAGUUUGAGCUGAUGUAUG | 915 | 8485 | CAUACAUCAGCUCAAACUG | 2667 |
| rs2276881 | 8468 | AGUUUGAGCUGAUGUAUGU | 916 | 8468 | AGUUUGAGCUGAUGUAUGU | 916 | 8486 | ACAUACAUCAGCUCAAACU | 2668 |
| rs2276881 | 8469 | GUUUGAGCUGAUGUAUGUG | 917 | 8469 | GUUUGAGCUGAUGUAUGUG | 917 | 8487 | CACAUACAUCAGCUCAAAC | 2669 |
| rs2276881 | 8470 | UUUGAGCUGAUGUAUGUGA | 918 | 8470 | UUUGAGCUGAUGUAUGUGA | 918 | 8488 | UCACAUACAUCAGCUCAAA | 2670 |
| rs2276881 | 8471 | UUGAGCUGAUGUAUGUGAC | 919 | 8471 | UUGAGCUGAUGUAUGUGAC | 919 | 8489 | GUCACAUACAUCAGCUCAA | 2671 |
| rs2276881 | 8472 | UGAGCUGAUGUAUGUGACG | 920 | 8472 | UGAGCUGAUGUAUGUGACG | 920 | 8490 | CGUCACAUACAUCAGCUCA | 2672 |
| rs2276881 | 8473 | GAGCUGAUGUAUGUGACGC | 921 | 8473 | GAGCUGAUGUAUGUGACGC | 921 | 8491 | GCGUCACAUACAUCAGCUC | 2673 |
| rs2276881 | 8474 | AGCUGAUGUAUGUGACGCU | 922 | 8474 | AGCUGAUGUAUGUGACGCU | 922 | 8492 | AGCGUCACAUACAUCAGCU | 2674 |
| rs2276881 | 8475 | GCUGAUGUAUGUGACGCUG | 923 | 8475 | GCUGAUGUAUGUGACGCUG | 923 | 8493 | CAGCGUCACAUACAUCAGC | 2675 |
| rs2276881 | 8476 | CUGAUGUAUGUGACGCUGA | 924 | 8476 | CUGAUGUAUGUGACGCUGA | 924 | 8494 | UCAGCGUCACAUACAUCAG | 2676 |
| rs2276881 | 8477 | UGAUGUAUGUGACGCUGAC | 925 | 8477 | UGAUGUAUGUGACGCUGAC | 925 | 8495 | GUCAGCGUCACAUACAUCA | 2677 |
| rs2276881 | 8478 | GAUGUAUGUGACGCUGACA | 926 | 8478 | GAUGUAUGUGACGCUGACA | 926 | 8496 | UGUCAGCGUCACAUACAUC | 2678 |
| rs2276881 | 8460 | GCGCAACCAGUUUGAGCUA | 927 | 8460 | GCGCAACCAGUUUGAGCUA | 927 | 8478 | UAGCUCAAACUGGUUGCGC | 2679 |
| rs2276881 | 8461 | CGCAACCAGUUUGAGCUAA | 928 | 8461 | CGCAACCAGUUUGAGCUAA | 928 | 8479 | UUAGCUCAAACUGGUUGCG | 2680 |
| rs2276881 | 8462 | GCAACCAGUUUGAGCUAAU | 929 | 8462 | GCAACCAGUUUGAGCUAAU | 929 | 8480 | AUUAGCUCAAACUGGUUGC | 2681 |
| rs2276881 | 8463 | CAACCAGUUUGAGCUAAUG | 930 | 8463 | CAACCAGUUUGAGCUAAUG | 930 | 8481 | CAUUAGCUCAAACUGGUUG | 2682 |
| rs2276881 | 8464 | AACCAGUUUGAGCUAAUGU | 931 | 8464 | AACCAGUUUGAGCUAAUGU | 931 | 8482 | ACAUUAGCUCAAACUGGUU | 2683 |
| rs2276881 | 8465 | ACCAGUUUGAGCUAAUGUA | 932 | 8465 | ACCAGUUUGAGCUAAUGUA | 932 | 8483 | UACAUUAGCUCAAACUGGU | 2684 |
| rs2276881 | 8466 | CCAGUUUGAGCUAAUGUAU | 933 | 8466 | CCAGUUUGAGCUAAUGUAU | 933 | 8484 | AUACAUUAGCUCAAACUGG | 2685 |
| rs2276881 | 8467 | CAGUUUGAGCUAAUGUAUG | 934 | 8467 | CAGUUUGAGCUAAUGUAUG | 934 | 8485 | CAUACAUUAGCUCAAACUG | 2686 |
| rs2276881 | 8468 | AGUUUGAGCUAAUGUAUGU | 935 | 8468 | AGUUUGAGCUAAUGUAUGU | 935 | 8486 | ACAUACAUUAGCUCAAACU | 2687 |
| rs2276881 | 8469 | GUUUGAGCUAAUGUAUGUG | 936 | 8469 | GUUUGAGCUAAUGUAUGUG | 936 | 8487 | CACAUACAUUAGCUCAAAC | 2688 |
| rs2276881 | 8470 | UUUGAGCUAAUGUAUGUGA | 937 | 8470 | UUUGAGCUAAUGUAUGUGA | 937 | 8488 | UCACAUACAUUAGCUCAAA | 2689 |
| rs2276881 | 8471 | UUGAGCUAAUGUAUGUGAC | 938 | 8471 | UUGAGCUAAUGUAUGUGAC | 938 | 8489 | GUCACAUACAUUAGCUCAA | 2690 |
| rs2276881 | 8472 | UGAGCUAAUGUAUGUGACG | 939 | 8472 | UGAGCUAAUGUAUGUGACG | 939 | 8490 | CGUCACAUACAUUAGCUCA | 2691 |
| rs2276881 | 8473 | GAGCUAAUGUAUGUGACGC | 940 | 8473 | GAGCUAAUGUAUGUGACGC | 940 | 8491 | GCGUCACAUACAUUAGCUC | 2692 |
| rs2276881 | 8474 | AGCUAAUGUAUGUGACGCU | 941 | 8474 | AGCUAAUGUAUGUGACGCU | 941 | 8492 | AGCGUCACAUACAUUAGCU | 2693 |
| rs2276881 | 8475 | GCUAAUGUAUGUGACGCUG | 942 | 8475 | GCUAAUGUAUGUGACGCUG | 942 | 8493 | CAGCGUCACAUACAUUAGC | 2694 |
| rs2276881 | 8476 | CUAAUGUAUGUGACGCUGA | 943 | 8476 | CUAAUGUAUGUGACGCUGA | 943 | 8494 | UCAGCGUCACAUACAUUAG | 2695 |
| rs2276881 | 8477 | UAAUGUAUGUGACGCUGAC | 944 | 8477 | UAAUGUAUGUGACGCUGAC | 944 | 8495 | GUCAGCGUCACAUACAUUA | 2696 |
| rs2276881 | 8478 | AAUGUAUGUGACGCUGACA | 945 | 8478 | AAUGUAUGUGACGCUGACA | 945 | 8496 | UGUCAGCGUCACAUACAUU | 2697 |
| rs362272 | 8659 | GUUGGAGCCCUGCACGGCG | 946 | 8659 | GUUGGAGCCCUGCACGGCG | 946 | 8677 | CGCCGUGCAGGGCUCCAAC | 2698 |
| rs362272 | 8660 | UUGGAGCCCUGCACGGCGU | 947 | 8660 | UUGGAGCCCUGCACGGCGU | 947 | 8678 | ACGCCGUGCAGGGCUCCAA | 2699 |
| rs362272 | 8661 | UGGAGCCCUGCACGGCGUC | 948 | 8661 | UGGAGCCCUGCACGGCGUC | 948 | 8679 | GACGCCGUGCAGGGCUCCA | 2700 |
| rs362272 | 8662 | GGAGCCCUGCACGGCGUCC | 949 | 8662 | GGAGCCCUGCACGGCGUCC | 949 | 8680 | GGACGCCGUGCAGGGCUCC | 2701 |
| rs362272 | 8663 | GAGCCCUGCACGGCGUCCU | 950 | 8663 | GAGCCCUGCACGGCGUCCU | 950 | 8681 | AGGACGCCGUGCAGGGCUC | 2702 |
| rs362272 | 8664 | AGCCCUGCACGGCGUCCUC | 951 | 8664 | AGCCCUGCACGGCGUCCUC | 951 | 8682 | GAGGACGCCGUGCAGGGCU | 2703 |
| rs362272 | 8665 | GCCCUGCACGGCGUCCUCU | 952 | 8665 | GCCCUGCACGGCGUCCUCU | 952 | 8683 | AGAGGACGCCGUGCAGGGC | 2704 |
| rs362272 | 8666 | CCCUGCACGGCGUCCUCUA | 953 | 8666 | CCCUGCACGGCGUCCUCUA | 953 | 8684 | UAGAGGACGCCGUGCAGGG | 2705 |
| rs362272 | 8667 | CCUGCACGGCGUCCUCUAU | 954 | 8667 | CCUGCACGGCGUCCUCUAU | 954 | 8685 | AUAGAGGACGCCGUGCAGG | 2706 |
| rs362272 | 8668 | CUGCACGGCGUCCUCUAUG | 955 | 8668 | CUGCACGGCGUCCUCUAUG | 955 | 8686 | CAUAGAGGACGCCGUGCAG | 2707 |
| rs362272 | 8669 | UGCACGGCGUCCUCUAUGU | 956 | 8669 | UGCACGGCGUCCUCUAUGU | 956 | 8687 | ACAUAGAGGACGCCGUGCA | 2708 |
| rs362272 | 8670 | GCACGGCGUCCUCUAUGUG | 957 | 8670 | GCACGGCGUCCUCUAUGUG | 957 | 8688 | CACAUAGAGGACGCCGUGC | 2709 |
| rs362272 | 8671 | CACGGCGUCCUCUAUGUGC | 958 | 8671 | CACGGCGUCCUCUAUGUGC | 958 | 8689 | GCACAUAGAGGACGCCGUG | 2710 |
| rs362272 | 8672 | ACGGCGUCCUCUAUGUGCU | 959 | 8672 | ACGGCGUCCUCUAUGUGCU | 959 | 8690 | AGCACAUAGAGGACGCCGU | 2711 |
| rs362272 | 8673 | CGGCGUCCUCUAUGUGCUG | 960 | 8673 | CGGCGUCCUCUAUGUGCUG | 960 | 8691 | CAGCACAUAGAGGACGCCG | 2712 |
| rs362272 | 8674 | GGCGUCCUCUAUGUGCUGG | 961 | 8674 | GGCGUCCUCUAUGUGCUGG | 961 | 8692 | CCAGCACAUAGAGGACGCC | 2713 |
| rs362272 | 8675 | GCGUCCUCUAUGUGCUGGA | 962 | 8675 | GCGUCCUCUAUGUGCUGGA | 962 | 8693 | UCCAGCACAUAGAGGACGC | 2714 |
| rs362272 | 8676 | CGUCCUCUAUGUGCUGGAG | 963 | 8676 | CGUCCUCUAUGUGCUGGAG | 963 | 8694 | CUCCAGCACAUAGAGGACG | 2715 |
| rs362272 | 8677 | GUCCUCUAUGUGCUGGAGU | 964 | 8677 | GUCCUCUAUGUGCUGGAGU | 964 | 8695 | ACUCCAGCACAUAGAGGAC | 2716 |
| rs362272 | 8659 | GUUGGAGCCCUGCACGGCA | 965 | 8659 | GUUGGAGCCCUGCACGGCA | 965 | 8677 | UGCCGUGCAGGGCUCCAAC | 2717 |
| rs362272 | 8660 | UUGGAGCCCUGCACGGCAU | 966 | 8660 | UUGGAGCCCUGCACGGCAU | 966 | 8678 | AUGCCGUGCAGGGCUCCAA | 2718 |
| rs362272 | 8661 | UGGAGCCCUGCACGGCAUC | 967 | 8661 | UGGAGCCCUGCACGGCAUC | 967 | 8679 | GAUGCCGUGCAGGGCUCCA | 2719 |
| rs362272 | 8662 | GGAGCCCUGCACGGCAUCC | 968 | 8662 | GGAGCCCUGCACGGCAUCC | 968 | 8680 | GGAUGCCGUGCAGGGCUCC | 2720 |
| rs362272 | 8663 | GAGCCCUGCACGGCAUCCU | 969 | 8663 | GAGCCCUGCACGGCAUCCU | 969 | 8681 | AGGAUGCCGUGCAGGGCUC | 2721 |
| rs362272 | 8664 | AGCCCUGCACGGCAUCCUC | 970 | 8664 | AGCCCUGCACGGCAUCCUC | 970 | 8682 | GAGGAUGCCGUGCAGGGCU | 2722 |
| rs362272 | 8665 | GCCCUGCACGGCAUCCUCU | 971 | 8665 | GCCCUGCACGGCAUCCUCU | 971 | 8683 | AGAGGAUGCCGUGCAGGGC | 2723 |
| rs362272 | 8666 | CCCUGCACGGCAUCCUCUA | 972 | 8666 | CCCUGCACGGCAUCCUCUA | 972 | 8684 | UAGAGGAUGCCGUGCAGGG | 2724 |
| rs362272 | 8667 | CCUGCACGGCAUCCUCUAU | 973 | 8667 | CCUGCACGGCAUCCUCUAU | 973 | 8685 | AUAGAGGAUGCCGUGCAGG | 2725 |
| rs362272 | 8668 | CUGCACGGCAUCCUCUAUG | 974 | 8668 | CUGCACGGCAUCCUCUAUG | 974 | 8686 | CAUAGAGGAUGCCGUGCAG | 2726 |
| rs362272 | 8669 | UGCACGGCAUCCUCUAUGU | 975 | 8669 | UGCACGGCAUCCUCUAUGU | 975 | 8687 | ACAUAGAGGAUGCCGUGCA | 2727 |
| rs362272 | 8670 | GCACGGCAUCCUCUAUGUG | 976 | 8670 | GCACGGCAUCCUCUAUGUG | 976 | 8688 | CACAUAGAGGAUGCCGUGC | 2728 |
| rs362272 | 8671 | CACGGCAUCCUCUAUGUGC | 977 | 8671 | CACGGCAUCCUCUAUGUGC | 977 | 8689 | GCACAUAGAGGAUGCCGUG | 2729 |
| rs362272 | 8672 | ACGGCAUCCUCUAUGUGCU | 978 | 8672 | ACGGCAUCCUCUAUGUGCU | 978 | 8690 | AGCACAUAGAGGAUGCCGU | 2730 |
| rs362272 | 8673 | CGGCAUCCUCUAUGUGCUG | 979 | 8673 | CGGCAUCCUCUAUGUGCUG | 979 | 8691 | CAGCACAUAGAGGAUGCCG | 2731 |
| rs362272 | 8674 | GGCAUCCUCUAUGUGCUGG | 980 | 8674 | GGCAUCCUCUAUGUGCUGG | 980 | 8692 | CCAGCACAUAGAGGAUGCC | 2732 |
| rs362272 | 8675 | GCAUCCUCUAUGUGCUGGA | 981 | 8675 | GCAUCCUCUAUGUGCUGGA | 981 | 8693 | UCCAGCACAUAGAGGAUGC | 2733 |
| rs362272 | 8676 | CAUCCUCUAUGUGCUGGAG | 982 | 8676 | CAUCCUCUAUGUGCUGGAG | 982 | 8694 | CUCCAGCACAUAGAGGAUG | 2734 |
| rs362272 | 8677 | AUCCUCUAUGUGCUGGAGU | 983 | 8677 | AUCCUCUAUGUGCUGGAGU | 983 | 8695 | ACUCCAGCACAUAGAGGAU | 2735 |
| rs3025807 | 9136 | UCAGACCCUAAUCCUGCAG | 984 | 9136 | UCAGACCCUAAUCCUGCAG | 984 | 9154 | CUGCAGGAUUAGGGUCUGA | 2736 |
| rs3025807 | 9137 | CAGACCCUAAUCCUGCAGC | 985 | 9137 | CAGACCCUAAUCCUGCAGC | 985 | 9155 | GCUGCAGGAUUAGGGUCUG | 2737 |
| rs3025807 | 9138 | AGACCCUAAUCCUGCAGCC | 986 | 9138 | AGACCCUAAUCCUGCAGCC | 986 | 9156 | GGCUGCAGGAUUAGGGUCU | 2738 |
| rs3025807 | 9139 | GACCCUAAUCCUGCAGCCC | 987 | 9139 | GACCCUAAUCCUGCAGCCC | 987 | 9157 | GGGCUGCAGGAUUAGGGUC | 2739 |
| rs3025807 | 9140 | ACCCUAAUCCUGCAGCCCC | 988 | 9140 | ACCCUAAUCCUGCAGCCCC | 988 | 9158 | GGGGCUGCAGGAUUAGGGU | 2740 |
| rs3025807 | 9141 | CCCUAAUCCUGCAGCCCCC | 989 | 9141 | CCCUAAUCCUGCAGCCCCC | 989 | 9159 | GGGGGCUGCAGGAUUAGGG | 2741 |
| rs3025807 | 9142 | CCUAAUCCUGCAGCCCCCG | 990 | 9142 | CCUAAUCCUGCAGCCCCCG | 990 | 9160 | CGGGGGCUGCAGGAUUAGG | 2742 |
| rs3025807 | 9143 | CUAAUCCUGCAGCCCCCGA | 991 | 9143 | CUAAUCCUGCAGCCCCCGA | 991 | 9161 | UCGGGGGCUGCAGGAUUAG | 2743 |
| rs3025807 | 9144 | UAAUCCUGCAGCCCCCGAC | 992 | 9144 | UAAUCCUGCAGCCCCCGAC | 992 | 9162 | GUCGGGGGCUGCAGGAUUA | 2744 |
| rs3025807 | 9145 | AAUCCUGCAGCCCCCGACA | 993 | 9145 | AAUCCUGCAGCCCCCGACA | 993 | 9163 | UGUCGGGGGCUGCAGGAUU | 2745 |
| rs3025807 | 9146 | AUCCUGCAGCCCCCGACAG | 994 | 9146 | AUCCUGCAGCCCCCGACAG | 994 | 9164 | CUGUCGGGGGCUGCAGGAU | 2746 |
| rs3025807 | 9147 | UCCUGCAGCCCCCGACAGC | 995 | 9147 | UCCUGCAGCCCCCGACAGC | 995 | 9165 | GCUGUCGGGGGCUGCAGGA | 2747 |
| rs3025807 | 9148 | CCUGCAGCCCCCGACAGCG | 996 | 9148 | CCUGCAGCCCCCGACAGCG | 996 | 9166 | CGCUGUCGGGGGCUGCAGG | 2748 |
| rs3025807 | 9149 | CUGCAGCCCCCGACAGCGA | 997 | 9149 | CUGCAGCCCCCGACAGCGA | 997 | 9167 | UCGCUGUCGGGGGCUGCAG | 2749 |
| rs3025807 | 9150 | UGCAGCCCCCGACAGCGAG | 998 | 9150 | UGCAGCCCCCGACAGCGAG | 998 | 9168 | CUCGCUGUCGGGGGCUGCA | 2750 |
| rs3025807 | 9151 | GCAGCCCCCGACAGCGAGU | 999 | 9151 | GCAGCCCCCGACAGCGAGU | 999 | 9169 | ACUCGCUGUCGGGGGCUGC | 2751 |
| rs3025807 | 9152 | CAGCCCCCGACAGCGAGUC | 1000 | 9152 | CAGCCCCCGACAGCGAGUC | 1000 | 9170 | GACUCGCUGUCGGGGGCUG | 2752 |
| rs3025807 | 9153 | AGCCCCCGACAGCGAGUCA | 1001 | 9153 | AGCCCCCGACAGCGAGUCA | 1001 | 9171 | UGACUCGCUGUCGGGGGCU | 2753 |
| rs3025807 | 9154 | GCCCCCGACAGCGAGUCAG | 1002 | 9154 | GCCCCCGACAGCGAGUCAG | 1002 | 9172 | CUGACUCGCUGUCGGGGGC | 2754 |
| rs3025807 | 9136 | UCAGACCCUAAUCCUGCAT | 1003 | 9136 | UCAGACCCUAAUCCUGCAT | 1003 | 9154 | AUGCAGGAUUAGGGUCUGA | 2755 |
| rs3025807 | 9137 | CAGACCCUAAUCCUGCATC | 1004 | 9137 | CAGACCCUAAUCCUGCATC | 1004 | 9155 | GAUGCAGGAUUAGGGUCUG | 2756 |
| rs3025807 | 9138 | AGACCCUAAUCCUGCATCC | 1005 | 9138 | AGACCCUAAUCCUGCATCC | 1005 | 9156 | GGAUGCAGGAUUAGGGUCU | 2757 |
| rs3025807 | 9139 | GACCCUAAUCCUGCATCCC | 1006 | 9139 | GACCCUAAUCCUGCATCCC | 1006 | 9157 | GGGAUGCAGGAUUAGGGUC | 2758 |
| rs3025807 | 9140 | ACCCUAAUCCUGCATCCCC | 1007 | 9140 | ACCCUAAUCCUGCATCCCC | 1007 | 9158 | GGGGAUGCAGGAUUAGGGU | 2759 |
| rs3025807 | 9141 | CCCUAAUCCUGCATCCCCC | 1008 | 9141 | CCCUAAUCCUGCATCCCCC | 1008 | 9159 | GGGGGAUGCAGGAUUAGGG | 2760 |
| rs3025807 | 9142 | CCUAAUCCUGCATCCCCCG | 1009 | 9142 | CCUAAUCCUGCATCCCCCG | 1009 | 9160 | CGGGGGAUGCAGGAUUAGG | 2761 |
| rs3025807 | 9143 | CUAAUCCUGCATCCCCCGA | 1010 | 9143 | CUAAUCCUGCATCCCCCGA | 1010 | 9161 | UCGGGGGAUGCAGGAUUAG | 2762 |
| rs3025807 | 9144 | UAAUCCUGCATCCCCCGAC | 1011 | 9144 | UAAUCCUGCATCCCCCGAC | 1011 | 9162 | GUCGGGGGAUGCAGGAUUA | 2763 |
| rs3025807 | 9145 | AAUCCUGCATCCCCCGACA | 1012 | 9145 | AAUCCUGCATCCCCCGACA | 1012 | 9163 | UGUCGGGGGAUGCAGGAUU | 2764 |
| rs3025807 | 9146 | AUCCUGCATCCCCCGACAG | 1013 | 9146 | AUCCUGCATCCCCCGACAG | 1013 | 9164 | CUGUCGGGGGAUGCAGGAU | 2765 |
| rs3025807 | 9147 | UCCUGCATCCCCCGACAGC | 1014 | 9147 | UCCUGCATCCCCCGACAGC | 1014 | 9165 | GCUGUCGGGGGAUGCAGGA | 2766 |
| rs3025807 | 9148 | CCUGCATCCCCCGACAGCG | 1015 | 9148 | CCUGCATCCCCCGACAGCG | 1015 | 9166 | CGCUGUCGGGGGAUGCAGG | 2767 |
| rs3025807 | 9149 | CUGCATCCCCCGACAGCGA | 1016 | 9149 | CUGCATCCCCCGACAGCGA | 1016 | 9167 | UCGCUGUCGGGGGAUGCAG | 2768 |
| rs3025807 | 9150 | UGCATCCCCCGACAGCGAG | 1017 | 9150 | UGCATCCCCCGACAGCGAG | 1017 | 9168 | CUCGCUGUCGGGGGAUGCA | 2769 |
| rs3025807 | 9151 | GCATCCCCCGACAGCGAGU | 1018 | 9151 | GCATCCCCCGACAGCGAGU | 1018 | 9169 | ACUCGCUGUCGGGGGAUGC | 2770 |
| rs3025807 | 9152 | CATCCCCCGACAGCGAGUC | 1019 | 9152 | CATCCCCCGACAGCGAGUC | 1019 | 9170 | GACUCGCUGUCGGGGGAUG | 2771 |
| rs3025807 | 9153 | ATCCCCCGACAGCGAGUCA | 1020 | 9153 | ATCCCCCGACAGCGAGUCA | 1020 | 9171 | UGACUCGCUGUCGGGGGAU | 2772 |
| rs3025807 | 9154 | TCCCCCGACAGCGAGUCAG | 1021 | 9154 | TCCCCCGACAGCGAGUCAG | 1021 | 9172 | CUGACUCGCUGUCGGGGGA | 2773 |
| rs362308 | 9681 | AGCCCCAGGAAGCCCAUAU | 1022 | 9681 | AGCCCCAGGAAGCCCAUAU | 1022 | 9699 | AUAUGGGCUUCCUGGGGCU | 2774 |
| rs362308 | 9682 | GCCCCAGGAAGCCCAUAUC | 1023 | 9682 | GCCCCAGGAAGCCCAUAUC | 1023 | 9700 | GAUAUGGGCUUCCUGGGGC | 2775 |
| rs362308 | 9683 | CCCCAGGAAGCCCAUAUCA | 1024 | 9683 | CCCCAGGAAGCCCAUAUCA | 1024 | 9701 | UGAUAUGGGCUUCCUGGGG | 2776 |
| rs362308 | 9684 | CCCAGGAAGCCCAUAUCAC | 1025 | 9684 | CCCAGGAAGCCCAUAUCAC | 1025 | 9702 | GUGAUAUGGGCUUCCUGGG | 2777 |
| rs362308 | 9685 | CCAGGAAGCCCAUAUCACC | 1026 | 9685 | CCAGGAAGCCCAUAUCACC | 1026 | 9703 | GGUGAUAUGGGCUUCCUGG | 2778 |
| rs362308 | 9686 | CAGGAAGCCCAUAUCACCG | 1027 | 9686 | CAGGAAGCCCAUAUCACCG | 1027 | 9704 | CGGUGAUAUGGGCUUCCUG | 2779 |
| rs362308 | 9687 | AGGAAGCCCAUAUCACCGG | 1028 | 9687 | AGGAAGCCCAUAUCACCGG | 1028 | 9705 | CCGGUGAUAUGGGCUUCCU | 2780 |
| rs362308 | 9688 | GGAAGCCCAUAUCACCGGC | 1029 | 9688 | GGAAGCCCAUAUCACCGGC | 1029 | 9706 | GCCGGUGAUAUGGGCUUCC | 2781 |
| rs362308 | 9689 | GAAGCCCAUAUCACCGGCU | 1030 | 9689 | GAAGCCCAUAUCACCGGCU | 1030 | 9707 | AGCCGGUGAUAUGGGCUUC | 2782 |
| rs362308 | 9690 | AAGCCCAUAUCACCGGCUG | 1031 | 9690 | AAGCCCAUAUCACCGGCUG | 1031 | 9708 | CAGCCGGUGAUAUGGGCUU | 2783 |
| rs362308 | 9691 | AGCCCAUAUCACCGGCUGC | 1032 | 9691 | AGCCCAUAUCACCGGCUGC | 1032 | 9709 | GCAGCCGGUGAUAUGGGCU | 2784 |
| rs362308 | 9692 | GCCCAUAUCACCGGCUGCU | 1033 | 9692 | GCCCAUAUCACCGGCUGCU | 1033 | 9710 | AGCAGCCGGUGAUAUGGGC | 2785 |
| rs362308 | 9693 | CCCAUAUCACCGGCUGCUG | 1034 | 9693 | CCCAUAUCACCGGCUGCUG | 1034 | 9711 | CAGCAGCCGGUGAUAUGGG | 2786 |
| rs362308 | 9694 | CCAUAUCACCGGCUGCUGA | 1035 | 9694 | CCAUAUCACCGGCUGCUGA | 1035 | 9712 | UCAGCAGCCGGUGAUAUGG | 2787 |
| rs362308 | 9695 | CAUAUCACCGGCUGCUGAC | 1036 | 9695 | CAUAUCACCGGCUGCUGAC | 1036 | 9713 | GUCAGCAGCCGGUGAUAUG | 2788 |
| rs362308 | 9696 | AUAUCACCGGCUGCUGACU | 1037 | 9696 | AUAUCACCGGCUGCUGACU | 1037 | 9714 | AGUCAGCAGCCGGUGAUAU | 2789 |
| rs362308 | 9697 | UAUCACCGGCUGCUGACUU | 1038 | 9697 | UAUCACCGGCUGCUGACUU | 1038 | 9715 | AAGUCAGCAGCCGGUGAUA | 2790 |
| rs362308 | 9698 | AUCACCGGCUGCUGACUUG | 1039 | 9698 | AUCACCGGCUGCUGACUUG | 1039 | 9716 | CAAGUCAGCAGCCGGUGAU | 2791 |
| rs362308 | 9699 | UCACCGGCUGCUGACUUGU | 1040 | 9699 | UCACCGGCUGCUGACUUGU | 1040 | 9717 | ACAAGUCAGCAGCCGGUGA | 2792 |
| rs362308 | 9681 | AGCCCCAGGAAGCCCAUAC | 1041 | 9681 | AGCCCCAGGAAGCCCAUAC | 1041 | 9699 | GUAUGGGCUUCCUGGGGCU | 2793 |
| rs362308 | 9682 | GCCCCAGGAAGCCCAUACC | 1042 | 9682 | GCCCCAGGAAGCCCAUACC | 1042 | 9700 | GGUAUGGGCUUCCUGGGGC | 2794 |
| rs362308 | 9683 | CCCCAGGAAGCCCAUACCA | 1043 | 9683 | CCCCAGGAAGCCCAUACCA | 1043 | 9701 | UGGUAUGGGCUUCCUGGGG | 2795 |
| rs362308 | 9684 | CCCAGGAAGCCCAUACCAC | 1044 | 9684 | CCCAGGAAGCCCAUACCAC | 1044 | 9702 | GUGGUAUGGGCUUCCUGGG | 2796 |
| rs362308 | 9685 | CCAGGAAGCCCAUACCACC | 1045 | 9685 | CCAGGAAGCCCAUACCACC | 1045 | 9703 | GGUGGUAUGGGCUUCCUGG | 2797 |
| rs362308 | 9686 | CAGGAAGCCCAUACCACCG | 1046 | 9686 | CAGGAAGCCCAUACCACCG | 1046 | 9704 | CGGUGGUAUGGGCUUCCUG | 2798 |
| rs362308 | 9687 | AGGAAGCCCAUACCACCGG | 1047 | 9687 | AGGAAGCCCAUACCACCGG | 1047 | 9705 | CCGGUGGUAUGGGCUUCCU | 2799 |
| rs362308 | 9688 | GGAAGCCCAUACCACCGGC | 1048 | 9688 | GGAAGCCCAUACCACCGGC | 1048 | 9706 | GCCGGUGGUAUGGGCUUCC | 2800 |
| rs362308 | 9689 | GAAGCCCAUACCACCGGCU | 1049 | 9689 | GAAGCCCAUACCACCGGCU | 1049 | 9707 | AGCCGGUGGUAUGGGCUUC | 2801 |
| rs362308 | 9690 | AAGCCCAUACCACCGGCUG | 1050 | 9690 | AAGCCCAUACCACCGGCUG | 1050 | 9708 | CAGCCGGUGGUAUGGGCUU | 2802 |
| rs362308 | 9691 | AGCCCAUACCACCGGCUGC | 1051 | 9691 | AGCCCAUACCACCGGCUGC | 1051 | 9709 | GCAGCCGGUGGUAUGGGCU | 2803 |
| rs362308 | 9692 | GCCCAUACCACCGGCUGCU | 1052 | 9692 | GCCCAUACCACCGGCUGCU | 1052 | 9710 | AGCAGCCGGUGGUAUGGGC | 2804 |
| rs362308 | 9693 | CCCAUACCACCGGCUGCUG | 1053 | 9693 | CCCAUACCACCGGCUGCUG | 1053 | 9711 | CAGCAGCCGGUGGUAUGGG | 2805 |
| rs362308 | 9694 | CCAUACCACCGGCUGCUGA | 1054 | 9694 | CCAUACCACCGGCUGCUGA | 1054 | 9712 | UCAGCAGCCGGUGGUAUGG | 2806 |
| rs362308 | 9695 | CAUACCACCGGCUGCUGAC | 1055 | 9695 | CAUACCACCGGCUGCUGAC | 1055 | 9713 | GUCAGCAGCCGGUGGUAUG | 2807 |
| rs362308 | 9696 | AUACCACCGGCUGCUGACU | 1056 | 9696 | AUACCACCGGCUGCUGACU | 1056 | 9714 | AGUCAGCAGCCGGUGGUAU | 2808 |
| rs362308 | 9697 | UACCACCGGCUGCUGACUU | 1057 | 9697 | UACCACCGGCUGCUGACUU | 1057 | 9715 | AAGUCAGCAGCCGGUGGUA | 2809 |
| rs362308 | 9698 | ACCACCGGCUGCUGACUUG | 1058 | 9698 | ACCACCGGCUGCUGACUUG | 1058 | 9716 | CAAGUCAGCAGCCGGUGGU | 2810 |
| rs362308 | 9699 | CCACCGGCUGCUGACUUGU | 1059 | 9699 | CCACCGGCUGCUGACUUGU | 1059 | 9717 | ACAAGUCAGCAGCCGGUGG | 2811 |
| rs362307 | 9791 | GGAGCCUUUGGAAGUCUGU | 1060 | 9791 | GGAGCCUUUGGAAGUCUGU | 1060 | 9809 | ACAGACUUCCAAAGGCUCC | 2812 |
| rs362307 | 9792 | GAGCCUUUGGAAGUCUGUG | 1061 | 9792 | GAGCCUUUGGAAGUCUGUG | 1061 | 9810 | CACAGACUUCCAAAGGCUC | 2813 |
| rs362307 | 9793 | AGCCUUUGGAAGUCUGUGC | 1062 | 9793 | AGCCUUUGGAAGUCUGUGC | 1062 | 9811 | GCACAGACUUCCAAAGGCU | 2814 |
| rs362307 | 9794 | GCCUUUGGAAGUCUGUGCC | 1063 | 9794 | GCCUUUGGAAGUCUGUGCC | 1063 | 9812 | GGCACAGACUUCCAAAGGC | 2815 |
| rs362307 | 9795 | CCUUUGGAAGUCUGUGCCC | 1064 | 9795 | CCUUUGGAAGUCUGUGCCC | 1064 | 9813 | GGGCACAGACUUCCAAAGG | 2816 |
| rs362307 | 9796 | CUUUGGAAGUCUGUGCCCU | 1065 | 9796 | CUUUGGAAGUCUGUGCCCU | 1065 | 9814 | AGGGCACAGACUUCCAAAG | 2817 |
| rs362307 | 9797 | UUUGGAAGUCUGUGCCCUU | 1066 | 9797 | UUUGGAAGUCUGUGCCCUU | 1066 | 9815 | AAGGGCACAGACUUCCAAA | 2818 |
| rs362307 | 9798 | UUGGAAGUCUGUGCCCUUG | 1067 | 9798 | UUGGAAGUCUGUGCCCUUG | 1067 | 9816 | CAAGGGCACAGACUUCCAA | 2819 |
| rs362307 | 9799 | UGGAAGUCUGUGCCCUUGU | 1068 | 9799 | UGGAAGUCUGUGCCCUUGU | 1068 | 9817 | ACAAGGGCACAGACUUCCA | 2820 |
| rs362307 | 9800 | GGAAGUCUGUGCCCUUGUG | 1069 | 9800 | GGAAGUCUGUGCCCUUGUG | 1069 | 9818 | CACAAGGGCACAGACUUCC | 2821 |
| rs362307 | 9801 | GAAGUCUGUGCCCUUGUGC | 1070 | 9801 | GAAGUCUGUGCCCUUGUGC | 1070 | 9819 | GCACAAGGGCACAGACUUC | 2822 |
| rs362307 | 9802 | AAGUCUGUGCCCUUGUGCC | 1071 | 9802 | AAGUCUGUGCCCUUGUGCC | 1071 | 9820 | GGCACAAGGGCACAGACUU | 2823 |
| rs362307 | 9803 | AGUCUGUGCCCUUGUGCCC | 1072 | 9803 | AGUCUGUGCCCUUGUGCCC | 1072 | 9821 | GGGCACAAGGGCACAGACU | 2824 |
| rs362307 | 9804 | GUCUGUGCCCUUGUGCCCU | 1073 | 9804 | GUCUGUGCCCUUGUGCCCU | 1073 | 9822 | AGGGCACAAGGGCACAGAC | 2825 |
| rs362307 | 9805 | UCUGUGCCCUUGUGCCCUG | 1074 | 9805 | UCUGUGCCCUUGUGCCCUG | 1074 | 9823 | CAGGGCACAAGGGCACAGA | 2826 |
| rs362307 | 9806 | CUGUGCCCUUGUGCCCUGC | 1075 | 9806 | CUGUGCCCUUGUGCCCUGC | 1075 | 9824 | GCAGGGCACAAGGGCACAG | 2827 |
| rs362307 | 9807 | UGUGCCCUUGUGCCCUGCC | 1076 | 9807 | UGUGCCCUUGUGCCCUGCC | 1076 | 9825 | GGCAGGGCACAAGGGCACA | 2828 |
| rs362307 | 9808 | GUGCCCUUGUGCCCUGCCU | 1077 | 9808 | GUGCCCUUGUGCCCUGCCU | 1077 | 9826 | AGGCAGGGCACAAGGGCAC | 2829 |
| rs362307 | 9809 | UGCCCUUGUGCCCUGCCUC | 1078 | 9809 | UGCCCUUGUGCCCUGCCUC | 1078 | 9827 | GAGGCAGGGCACAAGGGCA | 2830 |
| rs362307 | 9791 | GGAGCCUUUGGAAGUCUGC | 1079 | 9791 | GGAGCCUUUGGAAGUCUGC | 1079 | 9809 | GCAGACUUCCAAAGGCUCC | 2831 |
| rs362307 | 9792 | GAGCCUUUGGAAGUCUGCG | 1080 | 9792 | GAGCCUUUGGAAGUCUGCG | 1080 | 9810 | CGCAGACUUCCAAAGGCUC | 2832 |
| rs362307 | 9793 | AGCCUUUGGAAGUCUGCGC | 1081 | 9793 | AGCCUUUGGAAGUCUGCGC | 1081 | 9811 | GCGCAGACUUCCAAAGGCU | 2833 |
| rs362307 | 9794 | GCCUUUGGAAGUCUGCGCC | 1082 | 9794 | GCCUUUGGAAGUCUGCGCC | 1082 | 9812 | GGCGCAGACUUCCAAAGGC | 2834 |
| rs362307 | 9795 | CCUUUGGAAGUCUGCGCCC | 1083 | 9795 | CCUUUGGAAGUCUGCGCCC | 1083 | 9813 | GGGCGCAGACUUCCAAAGG | 2835 |
| rs362307 | 9796 | CUUUGGAAGUCUGCGCCCU | 1084 | 9796 | CUUUGGAAGUCUGCGCCCU | 1084 | 9814 | AGGGCGCAGACUUCCAAAG | 2836 |
| rs362307 | 9797 | UUUGGAAGUCUGCGCCCUU | 1085 | 9797 | UUUGGAAGUCUGCGCCCUU | 1085 | 9815 | AAGGGCGCAGACUUCCAAA | 2837 |
| rs362307 | 9798 | UUGGAAGUCUGCGCCCUUG | 1086 | 9798 | UUGGAAGUCUGCGCCCUUG | 1086 | 9816 | CAAGGGCGCAGACUUCCAA | 2838 |
| rs362307 | 9799 | UGGAAGUCUGCGCCCUUGU | 1087 | 9799 | UGGAAGUCUGCGCCCUUGU | 1087 | 9817 | ACAAGGGCGCAGACUUCCA | 2839 |
| rs362307 | 9800 | GGAAGUCUGCGCCCUUGUG | 1088 | 9800 | GGAAGUCUGCGCCCUUGUG | 1088 | 9818 | CACAAGGGCGCAGACUUCC | 2840 |
| rs362307 | 9801 | GAAGUCUGCGCCCUUGUGC | 1089 | 9801 | GAAGUCUGCGCCCUUGUGC | 1089 | 9819 | GCACAAGGGCGCAGACUUC | 2841 |
| rs362307 | 9802 | AAGUCUGCGCCCUUGUGCC | 1090 | 9802 | AAGUCUGCGCCCUUGUGCC | 1090 | 9820 | GGCACAAGGGCGCAGACUU | 2842 |
| rs362307 | 9803 | AGUCUGCGCCCUUGUGCCC | 1091 | 9803 | AGUCUGCGCCCUUGUGCCC | 1091 | 9821 | GGGCACAAGGGCGCAGACU | 2843 |
| rs362307 | 9804 | GUCUGCGCCCUUGUGCCCU | 1092 | 9804 | GUCUGCGCCCUUGUGCCCU | 1092 | 9822 | AGGGCACAAGGGCGCAGAC | 2844 |
| rs362307 | 9805 | UCUGCGCCCUUGUGCCCUG | 1093 | 9805 | UCUGCGCCCUUGUGCCCUG | 1093 | 9823 | CAGGGCACAAGGGCGCAGA | 2845 |
| rs362307 | 9806 | CUGCGCCCUUGUGCCCUGC | 1094 | 9806 | CUGCGCCCUUGUGCCCUGC | 1094 | 9824 | GCAGGGCACAAGGGCGCAG | 2846 |
| rs362307 | 9807 | UGCGCCCUUGUGCCCUGCC | 1095 | 9807 | UGCGCCCUUGUGCCCUGCC | 1095 | 9825 | GGCAGGGCACAAGGGCGCA | 2847 |
| rs362307 | 9808 | GCGCCCUUGUGCCCUGCCU | 1096 | 9808 | GCGCCCUUGUGCCCUGCCU | 1096 | 9826 | AGGCAGGGCACAAGGGCGC | 2848 |
| rs362307 | 9809 | CGCCCUUGUGCCCUGCCUC | 1097 | 9809 | CGCCCUUGUGCCCUGCCUC | 1097 | 9827 | GAGGCAGGGCACAAGGGCG | 2849 |
| rs362306 | 10046 | GCUGGUUGUUGCCAGGUUG | 1098 | 10046 | GCUGGUUGUUGCCAGGUUG | 1098 | 10064 | CAACCUGGCAACAACCAGC | 2850 |
| rs362306 | 10047 | CUGGUUGUUGCCAGGUUGC | 1099 | 10047 | CUGGUUGUUGCCAGGUUGC | 1099 | 10065 | GCAACCUGGCAACAACCAG | 2851 |
| rs362306 | 10048 | UGGUUGUUGCCAGGUUGCA | 1100 | 10048 | UGGUUGUUGCCAGGUUGCA | 1100 | 10066 | UGCAACCUGGCAACAACCA | 2852 |
| rs362306 | 10049 | GGUUGUUGCCAGGUUGCAG | 1101 | 10049 | GGUUGUUGCCAGGUUGCAG | 1101 | 10067 | CUGCAACCUGGCAACAACC | 2853 |
| rs362306 | 10050 | GUUGUUGCCAGGUUGCAGC | 1102 | 10050 | GUUGUUGCCAGGUUGCAGC | 1102 | 10068 | GCUGCAACCUGGCAACAAC | 2854 |
| rs362306 | 10051 | UUGUUGCCAGGUUGCAGCU | 1103 | 10051 | UUGUUGCCAGGUUGCAGCU | 1103 | 10069 | AGCUGCAACCUGGCAACAA | 2855 |
| rs362306 | 10052 | UGUUGCCAGGUUGCAGCUG | 1104 | 10052 | UGUUGCCAGGUUGCAGCUG | 1104 | 10070 | CAGCUGCAACCUGGCAACA | 2856 |
| rs362306 | 10053 | GUUGCCAGGUUGCAGCUGC | 1105 | 10053 | GUUGCCAGGUUGCAGCUGC | 1105 | 10071 | GCAGCUGCAACCUGGCAAC | 2857 |
| rs362306 | 10054 | UUGCCAGGUUGCAGCUGCU | 1106 | 10054 | UUGCCAGGUUGCAGCUGCU | 1106 | 10072 | AGCAGCUGCAACCUGGCAA | 2858 |
| rs362306 | 10055 | UGCCAGGUUGCAGCUGCUC | 1107 | 10055 | UGCCAGGUUGCAGCUGCUC | 1107 | 10073 | GAGCAGCUGCAACCUGGCA | 2859 |
| rs362306 | 10056 | GCCAGGUUGCAGCUGCUCU | 1108 | 10056 | GCCAGGUUGCAGCUGCUCU | 1108 | 10074 | AGAGCAGCUGCAACCUGGC | 2860 |
| rs362306 | 10057 | CCAGGUUGCAGCUGCUCUU | 1109 | 10057 | CCAGGUUGCAGCUGCUCUU | 1109 | 10075 | AAGAGCAGCUGCAACCUGG | 2861 |
| rs362306 | 10058 | CAGGUUGCAGCUGCUCUUG | 1110 | 10058 | CAGGUUGCAGCUGCUCUUG | 1110 | 10076 | CAAGAGCAGCUGCAACCUG | 2862 |
| rs362306 | 10059 | AGGUUGCAGCUGCUCUUGC | 1111 | 10059 | AGGUUGCAGCUGCUCUUGC | 1111 | 10077 | GCAAGAGCAGCUGCAACCU | 2863 |
| rs362306 | 10060 | GGUUGCAGCUGCUCUUGCA | 1112 | 10060 | GGUUGCAGCUGCUCUUGCA | 1112 | 10078 | UGCAAGAGCAGCUGCAACC | 2864 |
| rs362306 | 10061 | GUUGCAGCUGCUCUUGCAU | 1113 | 10061 | GUUGCAGCUGCUCUUGCAU | 1113 | 10079 | AUGCAAGAGCAGCUGCAAC | 2865 |
| rs362306 | 10062 | UUGCAGCUGCUCUUGCAUC | 1114 | 10062 | UUGCAGCUGCUCUUGCAUC | 1114 | 10080 | GAUGCAAGAGCAGCUGCAA | 2866 |
| rs362306 | 10063 | UGCAGCUGCUCUUGCAUCU | 1115 | 10063 | UGCAGCUGCUCUUGCAUCU | 1115 | 10081 | AGAUGCAAGAGCAGCUGCA | 2867 |
| rs362306 | 10064 | GCAGCUGCUCUUGCAUCUG | 1116 | 10064 | GCAGCUGCUCUUGCAUCUG | 1116 | 10082 | CAGAUGCAAGAGCAGCUGC | 2868 |
| rs362306 | 10046 | GCUGGUUGUUGCCAGGUUA | 1117 | 10046 | GCUGGUUGUUGCCAGGUUA | 1117 | 10064 | UAACCUGGCAACAACCAGC | 2869 |
| rs362306 | 10047 | CUGGUUGUUGCCAGGUUAC | 1118 | 10047 | CUGGUUGUUGCCAGGUUAC | 1118 | 10065 | GUAACCUGGCAACAACCAG | 2870 |
| rs362306 | 10048 | UGGUUGUUGCCAGGUUACA | 1119 | 10048 | UGGUUGUUGCCAGGUUACA | 1119 | 10066 | UGUAACCUGGCAACAACCA | 2871 |
| rs362306 | 10049 | GGUUGUUGCCAGGUUACAG | 1120 | 10049 | GGUUGUUGCCAGGUUACAG | 1120 | 10067 | CUGUAACCUGGCAACAACC | 2872 |
| rs362306 | 10050 | GUUGUUGCCAGGUUACAGC | 1121 | 10050 | GUUGUUGCCAGGUUACAGC | 1121 | 10068 | GCUGUAACCUGGCAACAAC | 2873 |
| rs362306 | 10051 | UUGUUGCCAGGUUACAGCU | 1122 | 10051 | UUGUUGCCAGGUUACAGCU | 1122 | 10069 | AGCUGUAACCUGGCAACAA | 2874 |
| rs362306 | 10052 | UGUUGCCAGGUUACAGCUG | 1123 | 10052 | UGUUGCCAGGUUACAGCUG | 1123 | 10070 | CAGCUGUAACCUGGCAACA | 2875 |
| rs362306 | 10053 | GUUGCCAGGUUACAGCUGC | 1124 | 10053 | GUUGCCAGGUUACAGCUGC | 1124 | 10071 | GCAGCUGUAACCUGGCAAC | 2876 |
| rs362306 | 10054 | UUGCCAGGUUACAGCUGCU | 1125 | 10054 | UUGCCAGGUUACAGCUGCU | 1125 | 10072 | AGCAGCUGUAACCUGGCAA | 2877 |
| rs362306 | 10055 | UGCCAGGUUACAGCUGCUC | 1126 | 10055 | UGCCAGGUUACAGCUGCUC | 1126 | 10073 | GAGCAGCUGUAACCUGGCA | 2878 |
| rs362306 | 10056 | GCCAGGUUACAGCUGCUCU | 1127 | 10056 | GCCAGGUUACAGCUGCUCU | 1127 | 10074 | AGAGCAGCUGUAACCUGGC | 2879 |
| rs362306 | 10057 | CCAGGUUACAGCUGCUCUU | 1128 | 10057 | CCAGGUUACAGCUGCUCUU | 1128 | 10075 | AAGAGCAGCUGUAACCUGG | 2880 |
| rs362306 | 10058 | CAGGUUACAGCUGCUCUUG | 1129 | 10058 | CAGGUUACAGCUGCUCUUG | 1129 | 10076 | CAAGAGCAGCUGUAACCUG | 2881 |
| rs362306 | 10059 | AGGUUACAGCUGCUCUUGC | 1130 | 10059 | AGGUUACAGCUGCUCUUGC | 1130 | 10077 | GCAAGAGCAGCUGUAACCU | 2882 |
| rs362306 | 10060 | GGUUACAGCUGCUCUUGCA | 1131 | 10060 | GGUUACAGCUGCUCUUGCA | 1131 | 10078 | UGCAAGAGCAGCUGUAACC | 2883 |
| rs362306 | 10061 | GUUACAGCUGCUCUUGCAU | 1132 | 10061 | GUUACAGCUGCUCUUGCAU | 1132 | 10079 | AUGCAAGAGCAGCUGUAAC | 2884 |
| rs362306 | 10062 | UUACAGCUGCUCUUGCAUC | 1133 | 10062 | UUACAGCUGCUCUUGCAUC | 1133 | 10080 | GAUGCAAGAGCAGCUGUAA | 2885 |
| rs362306 | 10063 | UACAGCUGCUCUUGCAUCU | 1134 | 10063 | UACAGCUGCUCUUGCAUCU | 1134 | 10081 | AGAUGCAAGAGCAGCUGUA | 2886 |
| rs362306 | 10064 | ACAGCUGCUCUUGCAUCUG | 1135 | 10064 | ACAGCUGCUCUUGCAUCUG | 1135 | 10082 | CAGAUGCAAGAGCAGCUGU | 2887 |
| rs362268 | 10094 | CUCCCUCCUGCAGGCUGGC | 1136 | 10094 | CUCCCUCCUGCAGGCUGGC | 1136 | 10112 | GCCAGCCUGCAGGAGGGAG | 2888 |
| rs362268 | 10095 | UCCCUCCUGCAGGCUGGCU | 1137 | 10095 | UCCCUCCUGCAGGCUGGCU | 1137 | 10113 | AGCCAGCCUGCAGGAGGGA | 2889 |
| rs362268 | 10096 | CCCUCCUGCAGGCUGGCUG | 1138 | 10096 | CCCUCCUGCAGGCUGGCUG | 1138 | 10114 | CAGCCAGCCUGCAGGAGGG | 2890 |
| rs362268 | 10097 | CCUCCUGCAGGCUGGCUGU | 1139 | 10097 | CCUCCUGCAGGCUGGCUGU | 1139 | 10115 | ACAGCCAGCCUGCAGGAGG | 2891 |
| rs362268 | 10098 | CUCCUGCAGGCUGGCUGUU | 1140 | 10098 | CUCCUGCAGGCUGGCUGUU | 1140 | 10116 | kACAGCCAGCCUGCAGGAG | 2892 |
| rs362268 | 10099 | UCCUGCAGGCUGGCUGUUG | 1141 | 10099 | UCCUGCAGGCUGGCUGUUG | 1141 | 10117 | CAACAGCCAGCCUGCAGGA | 2893 |
| rs362268 | 10100 | CCUGCAGGCUGGCUGUUGG | 1142 | 10100 | CCUGCAGGCUGGCUGUUGG | 1142 | 10118 | CCAACAGCCAGCCUGCAGG | 2894 |
| rs362268 | 10101 | CUGCAGGCUGGCUGUUGGC | 1143 | 10101 | CUGCAGGCUGGCUGUUGGC | 1143 | 10119 | GCCAACAGCCAGCCUGCAG | 2895 |
| rs362268 | 10102 | UGCAGGCUGGCUGUUGGCC | 1144 | 10102 | UGCAGGCUGGCUGUUGGCC | 1144 | 10120 | GGCCAACAGCCAGCCUGCA | 2896 |
| rs362268 | 10103 | GCAGGCUGGCUGUUGGCCC | 1145 | 10103 | GCAGGCUGGCUGUUGGCCC | 1145 | 10121 | GGGCCAACAGCCAGCCUGC | 2897 |
| rs362268 | 10104 | CAGGCUGGCUGUUGGCCCC | 1146 | 10104 | CAGGCUGGCUGUUGGCCCC | 1146 | 10122 | GGGGCCAACAGCCAGCCUG | 2898 |
| rs362268 | 10105 | AGGCUGGCUGUUGGCCCCU | 1147 | 10105 | AGGCUGGCUGUUGGCCCCU | 1147 | 10123 | AGGGGCCAACAGCCAGCCU | 2899 |
| rs362268 | 10106 | GGCUGGCUGUUGGCCCCUC | 1148 | 10106 | GGCUGGCUGUUGGCCCCUC | 1148 | 10124 | GAGGGGCCAACAGCCAGCC | 2900 |
| rs362268 | 10107 | GCUGGCUGUUGGCCCCUCU | 1149 | 10107 | GCUGGCUGUUGGCCCCUCU | 1149 | 10125 | AGAGGGGCCAACAGCCAGC | 2901 |
| rs362268 | 10108 | CUGGCUGUUGGCCCCUCUG | 1150 | 10108 | CUGGCUGUUGGCCCCUCUG | 1150 | 10126 | CAGAGGGGCCAACAGCCAG | 2902 |
| rs362268 | 10109 | UGGCUGUUGGCCCCUCUGC | 1151 | 10109 | UGGCUGUUGGCCCCUCUGC | 1151 | 10127 | GCAGAGGGGCCAACAGCCA | 2903 |
| rs362268 | 10110 | GGCUGUUGGCCCCUCUGCU | 1152 | 10110 | GGCUGUUGGCCCCUCUGCU | 1152 | 10128 | AGCAGAGGGGCCAACAGCC | 2904 |
| rs362268 | 10111 | GCUGUUGGCCCCUCUGCUG | 1153 | 10111 | GCUGUUGGCCCCUCUGCUG | 1153 | 10129 | CAGCAGAGGGGCCAACAGC | 2905 |
| rs362268 | 10112 | CUGUUGGCCCCUCUGCUGU | 1154 | 10112 | CUGUUGGCCCCUCUGCUGU | 1154 | 10130 | ACAGCAGAGGGGCCAACAG | 2906 |
| rs362268 | 10094 | CUCCCUCCUGCAGGCUGGG | 1155 | 10094 | CUCCCUCCUGCAGGCUGGG | 1155 | 10112 | CCCAGCCUGCAGGAGGGAG | 2907 |
| rs362268 | 10095 | UCCCUCCUGCAGGCUGGGU | 1156 | 10095 | UCCCUCCUGCAGGCUGGGU | 1156 | 10113 | ACCCAGCCUGCAGGAGGGA | 2908 |
| rs362268 | 10096 | CCCUCCUGCAGGCUGGGUG | 1157 | 10096 | CCCUCCUGCAGGCUGGGUG | 1157 | 10114 | CACCCAGCCUGCAGGAGGG | 2909 |
| rs362268 | 10097 | CCUCCUGCAGGCUGGGUGU | 1158 | 10097 | CCUCCUGCAGGCUGGGUGU | 1158 | 10115 | ACACCCAGCCUGCAGGAGG | 2910 |
| rs362268 | 10098 | CUCCUGCAGGCUGGGUGUU | 1159 | 10098 | CUCCUGCAGGCUGGGUGUU | 1159 | 10116 | AACACCCAGCCUGCAGGAG | 2911 |
| rs362268 | 10099 | UCCUGCAGGCUGGGUGUUG | 1160 | 10099 | UCCUGCAGGCUGGGUGUUG | 1160 | 10117 | CAACACCCAGCCUGCAGGA | 2912 |
| rs362268 | 10100 | CCUGCAGGCUGGGUGUUGG | 1161 | 10100 | CCUGCAGGCUGGGUGUUGG | 1161 | 10118 | CCAACACCCAGCCUGCAGG | 2913 |
| rs362268 | 10101 | CUGCAGGCUGGGUGUUGGC | 1162 | 10101 | CUGCAGGCUGGGUGUUGGC | 1162 | 10119 | GCCAACACCCAGCCUGCAG | 2914 |
| rs362268 | 10102 | UGCAGGCUGGGUGUUGGCC | 1163 | 10102 | UGCAGGCUGGGUGUUGGCC | 1163 | 10120 | GGCCAACACCCAGCCUGCA | 2915 |
| rs362268 | 10103 | GCAGGCUGGGUGUUGGCCC | 1164 | 10103 | GCAGGCUGGGUGUUGGCCC | 1164 | 10121 | GGGCCAACACCCAGCCUGC | 2916 |
| rs362268 | 10104 | CAGGCUGGGUGUUGGCCCC | 1165 | 10104 | CAGGCUGGGUGUUGGCCCC | 1165 | 10122 | GGGGCCAACACCCAGCCUG | 2917 |
| rs362268 | 10105 | AGGCUGGGUGUUGGCCCCU | 1166 | 10105 | AGGCUGGGUGUUGGCCCCU | 1166 | 10123 | AGGGGCCAACACCCAGCCU | 2918 |
| rs362305 | 10113 | UGUUGGCCCCUCUGCUGUC | 1167 | 10113 | UGUUGGCCCCUCUGCUGUC | 1167 | 10131 | GACAGCAGAGGGGCCAACA | 2919 |
| rs362305 | 10114 | GUUGGCCCCUCUGCUGUCC | 1168 | 10114 | GUUGGCCCCUCUGCUGUCC | 1168 | 10132 | GGACAGCAGAGGGGCCAAC | 2920 |
| rs362305 | 10115 | UUGGCCCCUCUGCUGUCCU | 1169 | 10115 | UUGGCCCCUCUGCUGUCCU | 1169 | 10133 | AGGACAGCAGAGGGGCCAA | 2921 |
| rs362305 | 10116 | UGGCCCCUCUGCUGUCCUG | 1170 | 10116 | UGGCCCCUCUGCUGUCCUG | 1170 | 10134 | CAGGACAGCAGAGGGGCCA | 2922 |
| rs362305 | 10117 | GGCCCCUCUGCUGUCCUGC | 1171 | 10117 | GGCCCCUCUGCUGUCCUGC | 1171 | 10135 | GCAGGACAGCAGAGGGGCC | 2923 |
| rs362305 | 10118 | GCCCCUCUGCUGUCCUGCA | 1172 | 10118 | GCCCCUCUGCUGUCCUGCA | 1172 | 10136 | UGCAGGACAGCAGAGGGGC | 2924 |
| rs362305 | 10119 | CCCCUCUGCUGUCCUGCAG | 1173 | 10119 | CCCCUCUGCUGUCCUGCAG | 1173 | 10137 | CUGCAGGACAGCAGAGGGG | 2925 |
| rs362305 | 10120 | CCCUCUGCUGUCCUGCAGU | 1174 | 10120 | CCCUCUGCUGUCCUGCAGU | 1174 | 10138 | ACUGCAGGACAGCAGAGGG | 2926 |
| rs362305 | 10121 | CCUCUGCUGUCCUGCAGUA | 1175 | 10121 | CCUCUGCUGUCCUGCAGUA | 1175 | 10139 | UACUGCAGGACAGCAGAGG | 2927 |
| rs362305 | 10122 | CUCUGCUGUCCUGCAGUAG | 1176 | 10122 | CUCUGCUGUCCUGCAGUAG | 1176 | 10140 | CUACUGCAGGACAGCAGAG | 2928 |
| rs362305 | 10123 | UCUGCUGUCCUGCAGUAGA | 1177 | 10123 | UCUGCUGUCCUGCAGUAGA | 1177 | 10141 | UCUACUGCAGGACAGCAGA | 2929 |
| rs362305 | 10124 | CUGCUGUCCUGCAGUAGAA | 1178 | 10124 | CUGCUGUCCUGCAGUAGAA | 1178 | 10142 | UUCUACUGCAGGACAGCAG | 2930 |
| rs362305 | 10106 | GGCUGGCUGUUGGCCCCUG | 1179 | 10106 | GGCUGGCUGUUGGCCCCUG | 1179 | 10124 | CAGGGGCCAACAGCCAGCC | 2931 |
| rs362305 | 10107 | GCUGGCUGUUGGCCCCUGU | 1180 | 10107 | GCUGGCUGUUGGCCCCUGU | 1180 | 10125 | ACAGGGGCCAACAGCCAGC | 2932 |
| rs362305 | 10108 | CUGGCUGUUGGCCCCUGUG | 1181 | 10108 | CUGGCUGUUGGCCCCUGUG | 1181 | 10126 | CACAGGGGCCAACAGCCAG | 2933 |
| rs362305 | 10109 | UGGCUGUUGGCCCCUGUGC | 1182 | 10109 | UGGCUGUUGGCCCCUGUGC | 1182 | 10127 | GCACAGGGGCCAACAGCCA | 2934 |
| rs362305 | 10110 | GGCUGUUGGCCCCUGUGCU | 1183 | 10110 | GGCUGUUGGCCCCUGUGCU | 1183 | 10128 | AGCACAGGGGCCAACAGCC | 2935 |
| rs362305 | 10111 | GCUGUUGGCCCCUGUGCUG | 1184 | 10111 | GCUGUUGGCCCCUGUGCUG | 1184 | 10129 | CAGCACAGGGGCCAACAGC | 2936 |
| rs362305 | 10112 | CUGUUGGCCCCUGUGCUGU | 1185 | 10112 | CUGUUGGCCCCUGUGCUGU | 1185 | 10130 | ACAGCACAGGGGCCAACAG | 2937 |
| rs362305 | 10113 | UGUUGGCCCCUGUGCUGUC | 1186 | 10113 | UGUUGGCCCCUGUGCUGUC | 1186 | 10131 | GACAGCACAGGGGCCAACA | 2938 |
| rs362305 | 10114 | GUUGGCCCCUGUGCUGUCC | 1187 | 10114 | GUUGGCCCCUGUGCUGUCC | 1187 | 10132 | GGACAGCACAGGGGCCAAC | 2939 |
| rs362305 | 10115 | UUGGCCCCUGUGCUGUCCU | 1188 | 10115 | UUGGCCCCUGUGCUGUCCU | 1188 | 10133 | AGGACAGCACAGGGGCCAA | 2940 |
| rs362305 | 10116 | UGGCCCCUGUGCUGUCCUG | 1189 | 10116 | UGGCCCCUGUGCUGUCCUG | 1189 | 10134 | CAGGACAGCACAGGGGCCA | 2941 |
| rs362305 | 10117 | GGCCCCUGUGCUGUCCUGC | 1190 | 10117 | GGCCCCUGUGCUGUCCUGC | 1190 | 10135 | GCAGGACAGCACAGGGGCC | 2942 |
| rs362305 | 10118 | GCCCCUGUGCUGUCCUGCA | 1191 | 10118 | GCCCCUGUGCUGUCCUGCA | 1191 | 10136 | UGCAGGACAGCACAGGGGC | 2943 |
| rs362305 | 10119 | CCCCUGUGCUGUCCUGCAG | 1192 | 10119 | CCCCUGUGCUGUCCUGCAG | 1192 | 10137 | CUGCAGGACAGCACAGGGG | 2944 |
| rs362305 | 10120 | CCCUGUGCUGUCCUGCAGU | 1193 | 10120 | CCCUGUGCUGUCCUGCAGU | 1193 | 10138 | ACUGCAGGACAGCACAGGG | 2945 |
| rs362305 | 10121 | CCUGUGCUGUCCUGCAGUA | 1194 | 10121 | CCUGUGCUGUCCUGCAGUA | 1194 | 10139 | UACUGCAGGACAGCACAGG | 2946 |
| rs362305 | 10122 | CUGUGCUGUCCUGCAGUAG | 1195 | 10122 | CUGUGCUGUCCUGCAGUAG | 1195 | 10140 | CUACUGCAGGACAGCACAG | 2947 |
| rs362305 | 10123 | UGUGCUGUCCUGCAGUAGA | 1196 | 10123 | UGUGCUGUCCUGCAGUAGA | 1196 | 10141 | UCUACUGCAGGACAGCACA | 2948 |
| rs362305 | 10124 | GUGCUGUCCUGCAGUAGAA | 1197 | 10124 | GUGCUGUCCUGCAGUAGAA | 1197 | 10142 | UUCUACUGCAGGACAGCAC | 2949 |
| rs362304 | 10218 | AUGCACAGAUGCCAUGGCC | 1198 | 10218 | AUGCACAGAUGCCAUGGCC | 1198 | 10236 | GGCCAUGGCAUCUGUGCAU | 2950 |
| rs362304 | 10219 | UGCACAGAUGCCAUGGCCU | 1199 | 10219 | UGCACAGAUGCCAUGGCCU | 1199 | 10237 | AGGCCAUGGCAUCUGUGCA | 2951 |
| rs362304 | 10220 | GCACAGAUGCCAUGGCCUG | 1200 | 10220 | GCACAGAUGCCAUGGCCUG | 1200 | 10238 | CAGGCCAUGGCAUCUGUGC | 2952 |
| rs362304 | 10221 | CACAGAUGCCAUGGCCUGU | 1201 | 10221 | CACAGAUGCCAUGGCCUGU | 1201 | 10239 | ACAGGCCAUGGCAUCUGUG | 2953 |
| rs362304 | 10222 | ACAGAUGCCAUGGCCUGUG | 1202 | 10222 | ACAGAUGCCAUGGCCUGUG | 1202 | 10240 | CACAGGCCAUGGCAUCUGU | 2954 |
| rs362304 | 10223 | CAGAUGCCAUGGCCUGUGC | 1203 | 10223 | CAGAUGCCAUGGCCUGUGC | 1203 | 10241 | GCACAGGCCAUGGCAUCUG | 2955 |
| rs362304 | 10224 | AGAUGCCAUGGCCUGUGCU | 1204 | 10224 | AGAUGCCAUGGCCUGUGCU | 1204 | 10242 | AGCACAGGCCAUGGCAUCU | 2956 |
| rs362304 | 10225 | GAUGCCAUGGCCUGUGCUG | 1205 | 10225 | GAUGCCAUGGCCUGUGCUG | 1205 | 10243 | CAGCACAGGCCAUGGCAUC | 2957 |
| rs362304 | 10226 | AUGCCAUGGCCUGUGCUGG | 1206 | 10226 | AUGCCAUGGCCUGUGCUGG | 1206 | 10244 | CCAGCACAGGCCAUGGCAU | 2958 |
| rs362304 | 10227 | UGCCAUGGCCUGUGCUGGG | 1207 | 10227 | UGCCAUGGCCUGUGCUGGG | 1207 | 10245 | CCCAGCACAGGCCAUGGCA | 2959 |
| rs362304 | 10228 | GCCAUGGCCUGUGCUGGGC | 1208 | 10228 | GCCAUGGCCUGUGCUGGGC | 1208 | 10246 | GCCCAGCACAGGCCAUGGC | 2960 |
| rs362304 | 10229 | CCAUGGCCUGUGCUGGGCC | 1209 | 10229 | CCAUGGCCUGUGCUGGGCC | 1209 | 10247 | GGCCCAGCACAGGCCAUGG | 2961 |
| rs362304 | 10230 | CAUGGCCUGUGCUGGGCCA | 1210 | 10230 | CAUGGCCUGUGCUGGGCCA | 1210 | 10248 | UGGCCCAGCACAGGCCAUG | 2962 |
| rs362304 | 10231 | AUGGCCUGUGCUGGGCCAG | 1211 | 10231 | AUGGCCUGUGCUGGGCCAG | 1211 | 10249 | CUGGCCCAGCACAGGCCAU | 2963 |
| rs362304 | 10232 | UGGCCUGUGCUGGGCCAGU | 1212 | 10232 | UGGCCUGUGCUGGGCCAGU | 1212 | 10250 | ACUGGCCCAGCACAGGCCA | 2964 |
| rs362304 | 10233 | GGCCUGUGCUGGGCCAGUG | 1213 | 10233 | GGCCUGUGCUGGGCCAGUG | 1213 | 10251 | CACUGGCCCAGCACAGGCC | 2965 |
| rs362304 | 10234 | GCCUGUGCUGGGCCAGUGG | 1214 | 10234 | GCCUGUGCUGGGCCAGUGG | 1214 | 10252 | CCACUGGCCCAGCACAGGC | 2966 |
| rs362304 | 10235 | CCUGUGCUGGGCCAGUGGC | 1215 | 10235 | CCUGUGCUGGGCCAGUGGC | 1215 | 10253 | GCCACUGGCCCAGCACAGG | 2967 |
| rs362304 | 10236 | CUGUGCUGGGCCAGUGGCU | 1216 | 10236 | CUGUGCUGGGCCAGUGGCU | 1216 | 10254 | AGCCACUGGCCCAGCACAG | 2968 |
| rs362304 | 10218 | AUGCACAGAUGCCAUGGCA | 1217 | 10218 | AUGCACAGAUGCCAUGGCA | 1217 | 10236 | UGCCAUGGCAUCUGUGCAU | 2969 |
| rs362304 | 10219 | UGCACAGAUGCCAUGGCAU | 1218 | 10219 | UGCACAGAUGCCAUGGCAU | 1218 | 10237 | AUGCCAUGGCAUCUGUGCA | 2970 |
| rs362304 | 10220 | GCACAGAUGCCAUGGCAUG | 1219 | 10220 | GCACAGAUGCCAUGGCAUG | 1219 | 10238 | CAUGCCAUGGCAUCUGUGC | 2971 |
| rs362304 | 10221 | CACAGAUGCCAUGGCAUGU | 1220 | 10221 | CACAGAUGCCAUGGCAUGU | 1220 | 10239 | ACAUGCCAUGGCAUCUGUG | 2972 |
| rs362304 | 10222 | ACAGAUGCCAUGGCAUGUG | 1221 | 10222 | ACAGAUGCCAUGGCAUGUG | 1221 | 10240 | CACAUGCCAUGGCAUCUGU | 2973 |
| rs362304 | 10223 | CAGAUGCCAUGGCAUGUGC | 1222 | 10223 | CAGAUGCCAUGGCAUGUGC | 1222 | 10241 | GCACAUGCCAUGGCAUCUG | 2974 |
| rs362304 | 10224 | AGAUGCCAUGGCAUGUGCU | 1223 | 10224 | AGAUGCCAUGGCAUGUGCU | 1223 | 10242 | AGCACAUGCCAUGGCAUCU | 2975 |
| rs362304 | 10225 | GAUGCCAUGGCAUGUGCUG | 1224 | 10225 | GAUGCCAUGGCAUGUGCUG | 1224 | 10243 | CAGCACAUGCCAUGGCAUC | 2976 |
| rs362304 | 10226 | AUGCCAUGGCAUGUGCUGG | 1225 | 10226 | AUGCCAUGGCAUGUGCUGG | 1225 | 10244 | CCAGCACAUGCCAUGGCAU | 2977 |
| rs362304 | 10227 | UGCCAUGGCAUGUGCUGGG | 1226 | 10227 | UGCCAUGGCAUGUGCUGGG | 1226 | 10245 | CCCAGCACAUGCCAUGGCA | 2978 |
| rs362304 | 10228 | GCCAUGGCAUGUGCUGGGC | 1227 | 10228 | GCCAUGGCAUGUGCUGGGC | 1227 | 10246 | GCCCAGCACAUGCCAUGGC | 2979 |
| rs362304 | 10229 | CCAUGGCAUGUGCUGGGCC | 1228 | 10229 | CCAUGGCAUGUGCUGGGCC | 1228 | 10247 | GGCCCAGCACAUGCCAUGG | 2980 |
| rs362304 | 10230 | CAUGGCAUGUGCUGGGCCA | 1229 | 10230 | CAUGGCAUGUGCUGGGCCA | 1229 | 10248 | UGGCCCAGCACAUGCCAUG | 2981 |
| rs362304 | 10231 | AUGGCAUGUGCUGGGCCAG | 1230 | 10231 | AUGGCAUGUGCUGGGCCAG | 1230 | 10249 | CUGGCCCAGCACAUGCCAU | 2982 |
| rs362304 | 10232 | UGGCAUGUGCUGGGCCAGU | 1231 | 10232 | UGGCAUGUGCUGGGCCAGU | 1231 | 10250 | ACUGGCCCAGCACAUGCCA | 2983 |
| rs362304 | 10233 | GGCAUGUGCUGGGCCAGUG | 1232 | 10233 | GGCAUGUGCUGGGCCAGUG | 1232 | 10251 | CACUGGCCCAGCACAUGCC | 2984 |
| rs362304 | 10234 | GCAUGUGCUGGGCCAGUGG | 1233 | 10234 | GCAUGUGCUGGGCCAGUGG | 1233 | 10252 | CCACUGGCCCAGCACAUGC | 2985 |
| rs362304 | 10235 | CAUGUGCUGGGCCAGUGGC | 1234 | 10235 | CAUGUGCUGGGCCAGUGGC | 1234 | 10253 | GCCACUGGCCCAGCACAUG | 2986 |
| rs362304 | 10236 | AUGUGCUGGGCCAGUGGCU | 1235 | 10236 | AUGUGCUGGGCCAGUGGCU | 1235 | 10254 | AGCCACUGGCCCAGCACAU | 2987 |
| rs362303 | 10253 | CUGGGGGUGCUAGACACCC | 1236 | 10253 | CUGGGGGUGCUAGACACCC | 1236 | 10271 | GGGUGUCUAGCACCCCCAG | 2988 |
| rs362303 | 10254 | UGGGGGUGCUAGACACCCG | 1237 | 10254 | UGGGGGUGCUAGACACCCG | 1237 | 10272 | CGGGUGUCUAGCACCCCCA | 2989 |
| rs362303 | 10255 | GGGGGUGCUAGACACCCGG | 1238 | 10255 | GGGGGUGCUAGACACCCGG | 1238 | 10273 | CCGGGUGUCUAGCACCCCC | 2990 |
| rs362303 | 10256 | GGGGUGCUAGACACCCGGC | 1239 | 10256 | GGGGUGCUAGACACCCGGC | 1239 | 10274 | GCCGGGUGUCUAGCACCCC | 2991 |
| rs362303 | 10257 | GGGUGCUAGACACCCGGCA | 1240 | 10257 | GGGUGCUAGACACCCGGCA | 1240 | 10275 | UGCCGGGUGUCUAGCACCC | 2992 |
| rs362303 | 10258 | GGUGCUAGACACCCGGCAC | 1241 | 10258 | GGUGCUAGACACCCGGCAC | 1241 | 10276 | GUGCCGGGUGUCUAGCACC | 2993 |
| rs362303 | 10259 | GUGCUAGACACCCGGCACC | 1242 | 10259 | GUGCUAGACACCCGGCACC | 1242 | 10277 | GGUGCCGGGUGUCUAGCAC | 2994 |
| rs362303 | 10260 | UGCUAGACACCCGGCACCA | 1243 | 10260 | UGCUAGACACCCGGCACCA | 1243 | 10278 | UGGUGCCGGGUGUCUAGCA | 2995 |
| rs362303 | 10261 | GCUAGACACCCGGCACCAU | 1244 | 10261 | GCUAGACACCCGGCACCAU | 1244 | 10279 | AUGGUGCCGGGUGUCUAGC | 2996 |
| rs362303 | 10262 | CUAGACACCCGGCACCAUU | 1245 | 10262 | CUAGACACCCGGCACCAUU | 1245 | 10280 | AAUGGUGCCGGGUGUCUAG | 2997 |
| rs362303 | 10263 | UAGACACCCGGCACCAUUC | 1246 | 10263 | UAGACACCCGGCACCAUUC | 1246 | 10281 | GAAUGGUGCCGGGUGUCUA | 2998 |
| rs362303 | 10264 | AGACACCCGGCACCAUUCU | 1247 | 10264 | AGACACCCGGCACCAUUCU | 1247 | 10282 | AGAAUGGUGCCGGGUGUCU | 2999 |
| rs362303 | 10265 | GACACCCGGCACCAUUCUC | 1248 | 10265 | GACACCCGGCACCAUUCUC | 1248 | 10283 | GAGAAUGGUGCCGGGUGUC | 3000 |
| rs362303 | 10266 | ACACCCGGCACCAUUCUCC | 1249 | 10266 | ACACCCGGCACCAUUCUCC | 1249 | 10284 | GGAGAAUGGUGCCGGGUGU | 3001 |
| rs362303 | 10267 | CACCCGGCACCAUUCUCCC | 1250 | 10267 | CACCCGGCACCAUUCUCCC | 1250 | 10285 | GGGAGAAUGGUGCCGGGUG | 3002 |
| rs362303 | 10268 | ACCCGGCACCAUUCUCCCU | 1251 | 10268 | ACCCGGCACCAUUCUCCCU | 1251 | 10286 | AGGGAGAAUGGUGCCGGGU | 3003 |
| rs362303 | 10269 | CCCGGCACCAUUCUCCCUU | 1252 | 10269 | CCCGGCACCAUUCUCCCUU | 1252 | 10287 | AAGGGAGAAUGGUGCCGGG | 3004 |
| rs362303 | 10270 | CCGGCACCAUUCUCCCUUC | 1253 | 10270 | CCGGCACCAUUCUCCCUUC | 1253 | 10288 | GAAGGGAGAAUGGUGCCGG | 3005 |
| rs362303 | 10271 | CGGCACCAUUCUCCCUUCU | 1254 | 10271 | CGGCACCAUUCUCCCUUCU | 1254 | 10289 | AGAAGGGAGAAUGGUGCCG | 3006 |
| rs362303 | 10253 | CUGGGGGUGCUAGACACCU | 1255 | 10253 | CUGGGGGUGCUAGACACCU | 1255 | 10271 | AGGUGUCUAGCACCCCCAG | 3007 |
| rs362303 | 10254 | UGGGGGUGCUAGACACCUG | 1256 | 10254 | UGGGGGUGCUAGACACCUG | 1256 | 10272 | CAGGUGUCUAGCACCCCCA | 3008 |
| rs362303 | 10255 | GGGGGUGCUAGACACCUGG | 1257 | 10255 | GGGGGUGCUAGACACCUGG | 1257 | 10273 | CCAGGUGUCUAGCACCCCC | 3009 |
| rs362303 | 10256 | GGGGUGCUAGACACCUGGC | 1258 | 10256 | GGGGUGCUAGACACCUGGC | 1258 | 10274 | GCCAGGUGUCUAGCACCCC | 3010 |
| rs362303 | 10257 | GGGUGCUAGACACCUGGCA | 1259 | 10257 | GGGUGCUAGACACCUGGCA | 1259 | 10275 | UGCCAGGUGUCUAGCACCC | 3011 |
| rs362303 | 10258 | GGUGCUAGACACCUGGCAC | 1260 | 10258 | GGUGCUAGACACCUGGCAC | 1260 | 10276 | GUGCCAGGUGUCUAGCACC | 3012 |
| rs362303 | 10259 | GUGCUAGACACCUGGCACC | 1261 | 10259 | GUGCUAGACACCUGGCACC | 1261 | 10277 | GGUGCCAGGUGUCUAGCAC | 3013 |
| rs362303 | 10260 | UGCUAGACACCUGGCACCA | 1262 | 10260 | UGCUAGACACCUGGCACCA | 1262 | 10278 | UGGUGCCAGGUGUCUAGCA | 3014 |
| rs362303 | 10261 | GCUAGACACCUGGCACCAU | 1263 | 10261 | GCUAGACACCUGGCACCAU | 1263 | 10279 | AUGGUGCCAGGUGUCUAGC | 3015 |
| rs362303 | 10262 | CUAGACACCUGGCACCAUU | 1264 | 10262 | CUAGACACCUGGCACCAUU | 1264 | 10280 | AAUGGUGCCAGGUGUCUAG | 3016 |
| rs362303 | 10263 | UAGACACCUGGCACCAUUC | 1265 | 10263 | UAGACACCUGGCACCAUUC | 1265 | 10281 | GAAUGGUGCCAGGUGUCUA | 3017 |
| rs362303 | 10264 | AGACACCUGGCACCAUUCU | 1266 | 10264 | AGACACCUGGCACCAUUCU | 1266 | 10282 | AGAAUGGUGCCAGGUGUCU | 3018 |
| rs362303 | 10265 | GACACCUGGCACCAUUCUC | 1267 | 10265 | GACACCUGGCACCAUUCUC | 1267 | 10283 | GAGAAUGGUGCCAGGUGUC | 3019 |
| rs362303 | 10266 | ACACCUGGCACCAUUCUCC | 1268 | 10266 | ACACCUGGCACCAUUCUCC | 1268 | 10284 | GGAGAAUGGUGCCAGGUGU | 3020 |
| rs362303 | 10267 | CACCUGGCACCAUUCUCCC | 1269 | 10267 | CACCUGGCACCAUUCUCCC | 1269 | 10285 | GGGAGAAUGGUGCCAGGUG | 3021 |
| rs362303 | 10268 | ACCUGGCACCAUUCUCCCU | 1270 | 10268 | ACCUGGCACCAUUCUCCCU | 1270 | 10286 | AGGGAGAAUGGUGCCAGGU | 3022 |
| rs362303 | 10269 | CCUGGCACCAUUCUCCCUU | 1271 | 10269 | CCUGGCACCAUUCUCCCUU | 1271 | 10287 | AAGGGAGAAUGGUGCCAGG | 3023 |
| rs362303 | 10270 | CUGGCACCAUUCUCCCUUC | 1272 | 10270 | CUGGCACCAUUCUCCCUUC | 1272 | 10288 | GAAGGGAGAAUGGUGCCAG | 3024 |
| rs362303 | 10271 | UGGCACCAUUCUCCCUUCU | 1273 | 10271 | UGGCACCAUUCUCCCUUCU | 1273 | 10289 | AGAAGGGAGAAUGGUGCCA | 3025 |
| rs1557210 | 10861 | UGUGUUUUGUCUGAGCCUC | 1274 | 10861 | UGUGUUUUGUCUGAGCCUC | 1274 | 10879 | GAGGCUCAGACAAAACACA | 3026 |
| rs1557210 | 10862 | GUGUUUUGUCUGAGCCUCU | 1275 | 10862 | GUGUUUUGUCUGAGCCUCU | 1275 | 10880 | AGAGGCUCAGACAAAACAC | 3027 |
| rs1557210 | 10863 | UGUUUUGUCUGAGCCUCUC | 1276 | 10863 | UGUUUUGUCUGAGCCUCUC | 1276 | 10881 | GAGAGGCUCAGACAAAACA | 3028 |
| rs1557210 | 10864 | GUUUUGUCUGAGCCUCUCU | 1277 | 10864 | GUUUUGUCUGAGCCUCUCU | 1277 | 10882 | AGAGAGGCUCAGACAAAAC | 3029 |
| rs1557210 | 10865 | UUUUGUCUGAGCCUCUCUC | 1278 | 10865 | UUUUGUCUGAGCCUCUCUC | 1278 | 10883 | GAGAGAGGCUCAGACAAAA | 3030 |
| rs1557210 | 10866 | UUUGUCUGAGCCUCUCUCG | 1279 | 10866 | UUUGUCUGAGCCUCUCUCG | 1279 | 10884 | CGAGAGAGGCUCAGACAAA | 3031 |
| rs1557210 | 10867 | UUGUCUGAGCCUCUCUCGG | 1280 | 10867 | UUGUCUGAGCCUCUCUCGG | 1280 | 10885 | CCGAGAGAGGCUCAGACAA | 3032 |
| rs1557210 | 10868 | UGUCUGAGCCUCUCUCGGU | 1281 | 10868 | UGUCUGAGCCUCUCUCGGU | 1281 | 10886 | ACCGAGAGAGGCUCAGACA | 3033 |
| rs1557210 | 10869 | GUCUGAGCCUCUCUCGGUC | 1282 | 10869 | GUCUGAGCCUCUCUCGGUC | 1282 | 10887 | GACCGAGAGAGGCUCAGAC | 3034 |
| rs1557210 | 10870 | UCUGAGCCUCUCUCGGUCA | 1283 | 10870 | UCUGAGCCUCUCUCGGUCA | 1283 | 10888 | UGACCGAGAGAGGCUCAGA | 3035 |
| rs1557210 | 10871 | CUGAGCCUCUCUCGGUCAA | 1284 | 10871 | CUGAGCCUCUCUCGGUCAA | 1284 | 10889 | UUGACCGAGAGAGGCUCAG | 3036 |
| rs1557210 | 10872 | UGAGCCUCUCUCGGUCAAC | 1285 | 10872 | UGAGCCUCUCUCGGUCAAC | 1285 | 10890 | GUUGACCGAGAGAGGCUCA | 3037 |
| rs1557210 | 10873 | GAGCCUCUCUCGGUCAACA | 1286 | 10873 | GAGCCUCUCUCGGUCAACA | 1286 | 10891 | UGUUGACCGAGAGAGGCUC | 3038 |
| rs1557210 | 10874 | AGCCUCUCUCGGUCAACAG | 1287 | 10874 | AGCCUCUCUCGGUCAACAG | 1287 | 10892 | CUGUUGACCGAGAGAGGCU | 3039 |
| rs1557210 | 10875 | GCCUCUCUCGGUCAACAGC | 1288 | 10875 | GCCUCUCUCGGUCAACAGC | 1288 | 10893 | GCUGUUGACCGAGAGAGGC | 3040 |
| rs1557210 | 10876 | CCUCUCUCGGUCAACAGCA | 1289 | 10876 | CCUCUCUCGGUCAACAGCA | 1289 | 10894 | UGCUGUUGACCGAGAGAGG | 3041 |
| rs1557210 | 10877 | CUCUCUCGGUCAACAGCAA | 1290 | 10877 | CUCUCUCGGUCAACAGCAA | 1290 | 10895 | UUGCUGUUGACCGAGAGAG | 3042 |
| rs1557210 | 10878 | UCUCUCGGUCAACAGCAAA | 1291 | 10878 | UCUCUCGGUCAACAGCAAA | 1291 | 10896 | UUUGCUGUUGACCGAGAGA | 3043 |
| rs1557210 | 10879 | CUCUCGGUCAACAGCAAAG | 1292 | 10879 | CUCUCGGUCAACAGCAAAG | 1292 | 10897 | CUUUGCUGUUGACCGAGAG | 3044 |
| rs1557210 | 10861 | UGUGUUUUGUCUGAGCCUU | 1293 | 10861 | UGUGUUUUGUCUGAGCCUU | 1293 | 10879 | AAGGCUCAGACAAAACACA | 3045 |
| rs1557210 | 10862 | GUGUUUUGUCUGAGCCUUU | 1294 | 10862 | GUGUUUUGUCUGAGCCUUU | 1294 | 10880 | AAAGGCUCAGACAAAACAC | 3046 |
| rs1557210 | 10863 | UGUUUUGUCUGAGCCUUUC | 1295 | 10863 | UGUUUUGUCUGAGCCUUUC | 1295 | 10881 | GAAAGGCUCAGACAAAACA | 3047 |
| rs1557210 | 10864 | GUUUUGUCUGAGCCUUUCU | 1296 | 10864 | GUUUUGUCUGAGCCUUUCU | 1296 | 10882 | AGAAAGGCUCAGACAAAAC | 3048 |
| rs362302 | 10880 | UCUCGGUCAACAGCAAAGC | 1297 | 10880 | UCUCGGUCAACAGCAAAGC | 1297 | 10898 | GCUUUGCUGUUGACCGAGA | 3049 |
| rs362302 | 10881 | CUCGGUCAACAGCAAAGCU | 1298 | 10881 | CUCGGUCAACAGCAAAGCU | 1298 | 10899 | AGCUUUGCUGUUGACCGAG | 3050 |
| rs362302 | 10882 | UCGGUCAACAGCAAAGCUU | 1299 | 10882 | UCGGUCAACAGCAAAGCUU | 1299 | 10900 | AAGCUUUGCUGUUGACCGA | 3051 |
| rs362302 | 10883 | CGGUCAACAGCAAAGCUUG | 1300 | 10883 | CGGUCAACAGCAAAGCUUG | 1300 | 10901 | CAAGCUUUGCUGUUGACCG | 3052 |
| rs362302 | 10865 | UUUUGUCUGAGCCUCUCUU | 1301 | 10865 | UUUUGUCUGAGCCUCUCUU | 1301 | 10883 | AAGAGAGGCUCAGACAAAA | 3053 |
| rs362302 | 10866 | UUUGUCUGAGCCUCUCUUG | 1302 | 10866 | UUUGUCUGAGCCUCUCUUG | 1302 | 10884 | CAAGAGAGGCUCAGACAAA | 3054 |
| rs362302 | 10867 | UUGUCUGAGCCUCUCUUGG | 1303 | 10867 | UUGUCUGAGCCUCUCUUGG | 1303 | 10885 | CCAAGAGAGGCUCAGACAA | 3055 |
| rs362302 | 10868 | UGUCUGAGCCUCUCUUGGU | 1304 | 10868 | UGUCUGAGCCUCUCUUGGU | 1304 | 10886 | ACCAAGAGAGGCUCAGACA | 3056 |
| rs362302 | 10869 | GUCUGAGCCUCUCUUGGUC | 1305 | 10869 | GUCUGAGCCUCUCUUGGUC | 1305 | 10887 | GACCAAGAGAGGCUCAGAC | 3057 |
| rs362302 | 10870 | UCUGAGCCUCUCUUGGUCA | 1306 | 10870 | UCUGAGCCUCUCUUGGUCA | 1306 | 10888 | UGACCAAGAGAGGCUCAGA | 3058 |
| rs362302 | 10871 | CUGAGCCUCUCUUGGUCAA | 1307 | 10871 | CUGAGCCUCUCUUGGUCAA | 1307 | 10889 | UUGACCAAGAGAGGCUCAG | 3059 |
| rs362302 | 10872 | UGAGCCUCUCUUGGUCAAC | 1308 | 10872 | UGAGCCUCUCUUGGUCAAC | 1308 | 10890 | GUUGACCAAGAGAGGCUCA | 3060 |
| rs362302 | 10873 | GAGCCUCUCUUGGUCAACA | 1309 | 10873 | GAGCCUCUCUUGGUCAACA | 1309 | 10891 | UGUUGACCAAGAGAGGCUC | 3061 |
| rs362302 | 10874 | AGCCUCUCUUGGUCAACAG | 1310 | 10874 | AGCCUCUCUUGGUCAACAG | 1310 | 10892 | CUGUUGACCAAGAGAGGCU | 3062 |
| rs362302 | 10875 | GCCUCUCUUGGUCAACAGC | 1311 | 10875 | GCCUCUCUUGGUCAACAGC | 1311 | 10893 | GCUGUUGACCAAGAGAGGC | 3063 |
| rs362302 | 10876 | CCUCUCUUGGUCAACAGCA | 1312 | 10876 | CCUCUCUUGGUCAACAGCA | 1312 | 10894 | UGCUGUUGACCAAGAGAGG | 3064 |
| rs362302 | 10877 | CUCUCUUGGUCAACAGCAA | 1313 | 10877 | CUCUCUUGGUCAACAGCAA | 1313 | 10895 | UUGCUGUUGACCAAGAGAG | 3065 |
| rs362302 | 10878 | UCUCUUGGUCAACAGCAAA | 1314 | 10878 | UCUCUUGGUCAACAGCAAA | 1314 | 10896 | UUUGCUGUUGACCAAGAGA | 3066 |
| rs362302 | 10879 | CUCUUGGUCAACAGCAAAG | 1315 | 10879 | CUCUUGGUCAACAGCAAAG | 1315 | 10897 | CUUUGCUGUUGACCAAGAG | 3067 |
| rs362302 | 10880 | UCUUGGUCAACAGCAAAGC | 1316 | 10880 | UCUUGGUCAACAGCAAAGC | 1316 | 10898 | GCUUUGCUGUUGACCAAGA | 3068 |
| rs362302 | 10881 | CUUGGUCAACAGCAAAGCU | 1317 | 10881 | CUUGGUCAACAGCAAAGCU | 1317 | 10899 | AGCUUUGCUGUUGACCAAG | 3069 |
| rs362302 | 10882 | UUGGUCAACAGCAAAGCUU | 1318 | 10882 | UUGGUCAACAGCAAAGCUU | 1318 | 10900 | AAGCUUUGCUGUUGACCAA | 3070 |
| rs362302 | 10883 | UGGUCAACAGCAAAGCUUG | 1319 | 10883 | UGGUCAACAGCAAAGCUUG | 1319 | 10901 | CAAGCUUUGCUGUUGACCA | 3071 |
| rs3025805 | 10953 | CAGCUGACAUCUUGCACGG | 1320 | 10953 | CAGCUGACAUCUUGCACGG | 1320 | 10971 | CCGUGCAAGAUGUCAGCUG | 3072 |
| rs3025805 | 10954 | AGCUGACAUCUUGCACGGU | 1321 | 10954 | AGCUGACAUCUUGCACGGU | 1321 | 10972 | ACCGUGCAAGAUGUCAGCU | 3073 |
| rs3025805 | 10955 | GCUGACAUCUUGCACGGUG | 1322 | 10955 | GCUGACAUCUUGCACGGUG | 1322 | 10973 | CACCGUGCAAGAUGUCAGC | 3074 |
| rs3025805 | 10956 | CUGACAUCUUGCACGGUGA | 1323 | 10956 | CUGACAUCUUGCACGGUGA | 1323 | 10974 | UCACCGUGCAAGAUGUCAG | 3075 |
| rs3025805 | 10957 | UGACAUCUUGCACGGUGAC | 1324 | 10957 | UGACAUCUUGCACGGUGAC | 1324 | 10975 | GUCACCGUGCAAGAUGUCA | 3076 |
| rs3025805 | 10958 | GACAUCUUGCACGGUGACC | 1325 | 10958 | GACAUCUUGCACGGUGACC | 1325 | 10976 | GGUCACCGUGCAAGAUGUC | 3077 |
| rs3025805 | 10959 | ACAUCUUGCACGGUGACCC | 1326 | 10959 | ACAUCUUGCACGGUGACCC | 1326 | 10977 | GGGUCACCGUGCAAGAUGU | 3078 |
| rs3025805 | 10960 | CAUCUUGCACGGUGACCCC | 1327 | 10960 | CAUCUUGCACGGUGACCCC | 1327 | 10978 | GGGGUCACCGUGCAAGAUG | 3079 |
| rs3025805 | 10961 | AUCUUGCACGGUGACCCCU | 1328 | 10961 | AUCUUGCACGGUGACCCCU | 1328 | 10979 | AGGGGUCACCGUGCAAGAU | 3080 |
| rs3025805 | 10962 | UCUUGCACGGUGACCCCUU | 1329 | 10962 | UCUUGCACGGUGACCCCUU | 1329 | 10980 | AAGGGGUCACCGUGCAAGA | 3081 |
| rs3025805 | 10963 | CUUGCACGGUGACCCCUUU | 1330 | 10963 | CUUGCACGGUGACCCCUUU | 1330 | 10981 | AAAGGGGUCACCGUGCAAG | 3082 |
| rs3025805 | 10964 | UUGCACGGUGACCCCUUUU | 1331 | 10964 | UUGCACGGUGACCCCUUUU | 1331 | 10982 | AAAAGGGGUCACCGUGCAA | 3083 |
| rs3025805 | 10965 | UGCACGGUGACCCCUUUUA | 1332 | 10965 | UGCACGGUGACCCCUUUUA | 1332 | 10983 | UAAAAGGGGUCACCGUGCA | 3084 |
| rs3025805 | 10966 | GCACGGUGACCCCUUUUAG | 1333 | 10966 | GCACGGUGACCCCUUUUAG | 1333 | 10984 | CUAAAAGGGGUCACCGUGC | 3085 |
| rs3025805 | 10967 | CACGGUGACCCCUUUUAGU | 1334 | 10967 | CACGGUGACCCCUUUUAGU | 1334 | 10985 | ACUAAAAGGGGUCACCGUG | 3086 |
| rs3025805 | 10968 | ACGGUGACCCCUUUUAGUC | 1335 | 10968 | ACGGUGACCCCUUUUAGUC | 1335 | 10986 | GACUAAAAGGGGUCACCGU | 3087 |
| rs3025805 | 10969 | CGGUGACCCCUUUUAGUCA | 1336 | 10969 | CGGUGACCCCUUUUAGUCA | 1336 | 10987 | UGACUAAAAGGGGUCACCG | 3088 |
| rs3025805 | 10970 | GGUGACCCCUUUUAGUCAG | 1337 | 10970 | GGUGACCCCUUUUAGUCAG | 1337 | 10988 | CUGACUAAAAGGGGUCACC | 3089 |
| rs3025805 | 10971 | GUGACCCCUUUUAGUCAGG | 1338 | 10971 | GUGACCCCUUUUAGUCAGG | 1338 | 10989 | CCUGACUAAAAGGGGUCAC | 3090 |
| rs3025805 | 10953 | CAGCUGACAUCUUGCACGU | 1339 | 10953 | CAGCUGACAUCUUGCACGU | 1339 | 10971 | ACGUGCAAGAUGUCAGCUG | 3091 |
| rs3025805 | 10954 | AGCUGACAUCUUGCACGUU | 1340 | 10954 | AGCUGACAUCUUGCACGUU | 1340 | 10972 | AACGUGCAAGAUGUCAGCU | 3092 |
| rs3025805 | 10955 | GCUGACAUCUUGCACGUUG | 1341 | 10955 | GCUGACAUCUUGCACGUUG | 1341 | 10973 | CAACGUGCAAGAUGUCAGC | 3093 |
| rs3025805 | 10956 | CUGACAUCUUGCACGUUGA | 1342 | 10956 | CUGACAUCUUGCACGUUGA | 1342 | 10974 | UCAACGUGCAAGAUGUCAG | 3094 |
| rs3025805 | 10957 | UGACAUCUUGCACGUUGAC | 1343 | 10957 | UGACAUCUUGCACGUUGAC | 1343 | 10975 | GUCAACGUGCAAGAUGUCA | 3095 |
| rs3025805 | 10958 | GACAUCUUGCACGUUGACC | 1344 | 10958 | GACAUCUUGCACGUUGACC | 1344 | 10976 | GGUCAACGUGCAAGAUGUC | 3096 |
| rs3025805 | 10959 | ACAUCUUGCACGUUGACCC | 1345 | 10959 | ACAUCUUGCACGUUGACCC | 1345 | 10977 | GGGUCAACGUGCAAGAUGU | 3097 |
| rs3025805 | 10960 | CAUCUUGCACGUUGACCCC | 1346 | 10960 | CAUCUUGCACGUUGACCCC | 1346 | 10978 | GGGGUCAACGUGCAAGAUG | 3098 |
| rs3025805 | 10961 | AUCUUGCACGUUGACCCCU | 1347 | 10961 | AUCUUGCACGUUGACCCCU | 1347 | 10979 | AGGGGUCAACGUGCAAGAU | 3099 |
| rs3025805 | 10962 | UCUUGCACGUUGACCCCUU | 1348 | 10962 | UCUUGCACGUUGACCCCUU | 1348 | 10980 | AAGGGGUCAACGUGCAAGA | 3100 |
| rs3025805 | 10963 | CUUGCACGUUGACCCCUUU | 1349 | 10963 | CUUGCACGUUGACCCCUUU | 1349 | 10981 | AAAGGGGUCAACGUGCAAG | 3101 |
| rs3025805 | 10964 | UUGCACGUUGACCCCUUUU | 1350 | 10964 | UUGCACGUUGACCCCUUUU | 1350 | 10982 | AAAAGGGGUCAACGUGCAA | 3102 |
| rs3025805 | 10965 | UGCACGUUGACCCCUUUUA | 1351 | 10965 | UGCACGUUGACCCCUUUUA | 1351 | 10983 | UAAAAGGGGUCAACGUGCA | 3103 |
| rs3025805 | 10966 | GCACGUUGACCCCUUUUAG | 1352 | 10966 | GCACGUUGACCCCUUUUAG | 1352 | 10984 | CUAAAAGGGGUCAACGUGC | 3104 |
| rs3025805 | 10967 | CACGUUGACCCCUUUUAGU | 1353 | 10967 | CACGUUGACCCCUUUUAGU | 1353 | 10985 | ACUAAAAGGGGUCAACGUG | 3105 |
| rs3025805 | 10968 | ACGUUGACCCCUUUUAGUC | 1354 | 10968 | ACGUUGACCCCUUUUAGUC | 1354 | 10986 | GACUAAAAGGGGUCAACGU | 3106 |
| rs3025805 | 10969 | CGUUGACCCCUUUUAGUCA | 1355 | 10969 | CGUUGACCCCUUUUAGUCA | 1355 | 10987 | UGACUAAAAGGGGUCAACG | 3107 |
| rs3025805 | 10970 | GUUGACCCCUUUUAGUCAG | 1356 | 10970 | GUUGACCCCUUUUAGUCAG | 1356 | 10988 | CUGACUAAAAGGGGUCAAC | 3108 |
| rs3025805 | 10971 | UUGACCCCUUUUAGUCAGG | 1357 | 10971 | UUGACCCCUUUUAGUCAGG | 1357 | 10989 | CCUGACUAAAAGGGGUCAA | 3109 |
| rs362267 | 11163 | UUUGGGAGCUCUGCUUGCC | 1358 | 11163 | UUUGGGAGCUCUGCUUGCC | 1358 | 11181 | GGCAAGCAGAGCUCCCAAA | 3110 |
| rs362267 | 11164 | UUGGGAGCUCUGCUUGCCG | 1359 | 11164 | UUGGGAGCUCUGCUUGCCG | 1359 | 11182 | CGGCAAGCAGAGCUCCCAA | 3111 |
| rs362267 | 11165 | UGGGAGCUCUGCUUGCCGA | 1360 | 11165 | UGGGAGCUCUGCUUGCCGA | 1360 | 11183 | UCGGCAAGCAGAGCUCCCA | 3112 |
| rs362267 | 11166 | GGGAGCUCUGCUUGCCGAC | 1361 | 11166 | GGGAGCUCUGCUUGCCGAC | 1361 | 11184 | GUCGGCAAGCAGAGCUCCC | 3113 |
| rs362267 | 11167 | GGAGCUCUGCUUGCCGACU | 1362 | 11167 | GGAGCUCUGCUUGCCGACU | 1362 | 11185 | AGUCGGCAAGCAGAGCUCC | 3114 |
| rs362267 | 11168 | GAGCUCUGCUUGCCGACUG | 1363 | 11168 | GAGCUCUGCUUGCCGACUG | 1363 | 11186 | CAGUCGGCAAGCAGAGCUC | 3115 |
| rs362267 | 11169 | AGCUCUGCUUGCCGACUGG | 1364 | 11169 | AGCUCUGCUUGCCGACUGG | 1364 | 11187 | CCAGUCGGCAAGCAGAGCU | 3116 |
| rs362267 | 11170 | GCUCUGCUUGCCGACUGGC | 1365 | 11170 | GCUCUGCUUGCCGACUGGC | 1365 | 11188 | GCCAGUCGGCAAGCAGAGC | 3117 |
| rs362267 | 11171 | CUCUGCUUGCCGACUGGCU | 1366 | 11171 | CUCUGCUUGCCGACUGGCU | 1366 | 11189 | AGCCAGUCGGCAAGCAGAG | 3118 |
| rs362267 | 11172 | UCUGCUUGCCGACUGGCUG | 1367 | 11172 | UCUGCUUGCCGACUGGCUG | 1367 | 11190 | CAGCCAGUCGGCAAGCAGA | 3119 |
| rs362267 | 11173 | CUGCUUGCCGACUGGCUGU | 1368 | 11173 | CUGCUUGCCGACUGGCUGU | 1368 | 11191 | ACAGCCAGUCGGCAAGCAG | 3120 |
| rs362267 | 11174 | UGCUUGCCGACUGGCUGUG | 1369 | 11174 | UGCUUGCCGACUGGCUGUG | 1369 | 11192 | CACAGCCAGUCGGCAAGCA | 3121 |
| rs362267 | 11175 | GCUUGCCGACUGGCUGUGA | 1370 | 11175 | GCUUGCCGACUGGCUGUGA | 1370 | 11193 | UCACAGCCAGUCGGCAAGC | 3122 |
| rs362267 | 11176 | CUUGCCGACUGGCUGUGAG | 1371 | 11176 | CUUGCCGACUGGCUGUGAG | 1371 | 11194 | CUCACAGCCAGUCGGCAAG | 3123 |
| rs362267 | 11177 | UUGCCGACUGGCUGUGAGA | 1372 | 11177 | UUGCCGACUGGCUGUGAGA | 1372 | 11195 | UCUCACAGCCAGUCGGCAA | 3124 |
| rs362267 | 11178 | UGCCGACUGGCUGUGAGAC | 1373 | 11178 | UGCCGACUGGCUGUGAGAC | 1373 | 11196 | GUCUCACAGCCAGUCGGCA | 3125 |
| rs362267 | 11179 | GCCGACUGGCUGUGAGACG | 1374 | 11179 | GCCGACUGGCUGUGAGACG | 1374 | 11197 | CGUCUCACAGCCAGUCGGC | 3126 |
| rs362267 | 11180 | CCGACUGGCUGUGAGACGA | 1375 | 11180 | CCGACUGGCUGUGAGACGA | 1375 | 11198 | UCGUCUCACAGCCAGUCGG | 3127 |
| rs362267 | 11181 | CGACUGGCUGUGAGACGAG | 1376 | 11181 | CGACUGGCUGUGAGACGAG | 1376 | 11199 | CUCGUCUCACAGCCAGUCG | 3128 |
| rs362267 | 11163 | UUUGGGAGCUCUGCUUGCU | 1377 | 11163 | UUUGGGAGCUCUGCUUGCU | 1377 | 11181 | AGCAAGCAGAGCUCCCAAA | 3129 |
| rs362267 | 11164 | UUGGGAGCUCUGCUUGCUG | 1378 | 11164 | UUGGGAGCUCUGCUUGCUG | 1378 | 11182 | CAGCAAGCAGAGCUCCCAA | 3130 |
| rs362267 | 11165 | UGGGAGCUCUGCUUGCUGA | 1379 | 11165 | UGGGAGCUCUGCUUGCUGA | 1379 | 11183 | UCAGCAAGCAGAGCUCCCA | 3131 |
| rs362267 | 11166 | GGGAGCUCUGCUUGCUGAC | 1380 | 11166 | GGGAGCUCUGCUUGCUGAC | 1380 | 11184 | GUCAGCAAGCAGAGCUCCC | 3132 |
| rs362267 | 11167 | GGAGCUCUGCUUGCUGACU | 1381 | 11167 | GGAGCUCUGCUUGCUGACU | 1381 | 11185 | AGUCAGCAAGCAGAGCUCC | 3133 |
| rs362267 | 11168 | GAGCUCUGCUUGCUGACUG | 1382 | 11168 | GAGCUCUGCUUGCUGACUG | 1382 | 11186 | CAGUCAGCAAGCAGAGCUC | 3134 |
| rs362267 | 11169 | AGCUCUGCUUGCUGACUGG | 1383 | 11169 | AGCUCUGCUUGCUGACUGG | 1383 | 11187 | CCAGUCAGCAAGCAGAGCU | 3135 |
| rs362267 | 11170 | GCUCUGCUUGCUGACUGGC | 1384 | 11170 | GCUCUGCUUGCUGACUGGC | 1384 | 11188 | GCCAGUCAGCAAGCAGAGC | 3136 |
| rs362267 | 11171 | CUCUGCUUGCUGACUGGCU | 1385 | 11171 | CUCUGCUUGCUGACUGGCU | 1385 | 11189 | AGCCAGUCAGCAAGCAGAG | 3137 |
| rs362267 | 11172 | UCUGCUUGCUGACUGGCUG | 1386 | 11172 | UCUGCUUGCUGACUGGCUG | 1386 | 11190 | CAGCCAGUCAGCAAGCAGA | 3138 |
| rs362267 | 11173 | CUGCUUGCUGACUGGCUGU | 1387 | 11173 | CUGCUUGCUGACUGGCUGU | 1387 | 11191 | ACAGCCAGUCAGCAAGCAG | 3139 |
| rs362267 | 11174 | UGCUUGCUGACUGGCUGUG | 1388 | 11174 | UGCUUGCUGACUGGCUGUG | 1388 | 11192 | CACAGCCAGUCAGCAAGCA | 3140 |
| rs362267 | 11175 | GCUUGCUGACUGGCUGUGA | 1389 | 11175 | GCUUGCUGACUGGCUGUGA | 1389 | 11193 | UCACAGCCAGUCAGCAAGC | 3141 |
| rs362267 | 11176 | CUUGCUGACUGGCUGUGAG | 1390 | 11176 | CUUGCUGACUGGCUGUGAG | 1390 | 11194 | CUCACAGCCAGUCAGCAAG | 3142 |
| rs362267 | 11177 | UUGCUGACUGGCUGUGAGA | 1391 | 11177 | UUGCUGACUGGCUGUGAGA | 1391 | 11195 | UCUCACAGCCAGUCAGCAA | 3143 |
| rs362267 | 11178 | UGCUGACUGGCUGUGAGAC | 1392 | 11178 | UGCUGACUGGCUGUGAGAC | 1392 | 11196 | GUCUCACAGCCAGUCAGCA | 3144 |
| rs362267 | 11179 | GCUGACUGGCUGUGAGACG | 1393 | 11179 | GCUGACUGGCUGUGAGACG | 1393 | 11197 | CGUCUCACAGCCAGUCAGC | 3145 |
| rs362267 | 11180 | CUGACUGGCUGUGAGACGA | 1394 | 11180 | CUGACUGGCUGUGAGACGA | 1394 | 11198 | UCGUCUCACAGCCAGUCAG | 3146 |
| rs362267 | 11181 | UGACUGGCUGUGAGACGAG | 1395 | 11181 | UGACUGGCUGUGAGACGAG | 1395 | 11199 | CUCGUCUCACAGCCAGUCA | 3147 |
| rs362301 | 11382 | UGGCAGCUGGGGAGCAGCU | 1396 | 11382 | UGGCAGCUGGGGAGCAGCU | 1396 | 11400 | AGCUGCUCCCCAGCUGCCA | 3148 |
| rs362301 | 11383 | GGCAGCUGGGGAGCAGCUG | 1397 | 11383 | GGCAGCUGGGGAGCAGCUG | 1397 | 11401 | CAGCUGCUCCCCAGCUGCC | 3149 |
| rs362301 | 11384 | GCAGCUGGGGAGCAGCUGA | 1398 | 11384 | GCAGCUGGGGAGCAGCUGA | 1398 | 11402 | UCAGCUGCUCCCCAGCUGC | 3150 |
| rs362301 | 11385 | CAGCUGGGGAGCAGCUGAG | 1399 | 11385 | CAGCUGGGGAGCAGCUGAG | 1399 | 11403 | CUCAGCUGCUCCCCAGCUG | 3151 |
| rs362301 | 11386 | AGCUGGGGAGCAGCUGAGA | 1400 | 11386 | AGCUGGGGAGCAGCUGAGA | 1400 | 11404 | UCUCAGCUGCUCCCCAGCU | 3152 |
| rs362301 | 11387 | GCUGGGGAGCAGCUGAGAU | 1401 | 11387 | GCUGGGGAGCAGCUGAGAU | 1401 | 11405 | AUCUCAGCUGCUCCCCAGC | 3153 |
| rs362301 | 11388 | CUGGGGAGCAGCUGAGAUG | 1402 | 11388 | CUGGGGAGCAGCUGAGAUG | 1402 | 11406 | CAUCUCAGCUGCUCCCCAG | 3154 |
| rs362301 | 11389 | UGGGGAGCAGCUGAGAUGU | 1403 | 11389 | UGGGGAGCAGCUGAGAUGU | 1403 | 11407 | ACAUCUCAGCUGCUCCCCA | 3155 |
| rs362301 | 11390 | GGGGAGCAGCUGAGAUGUG | 1404 | 11390 | GGGGAGCAGCUGAGAUGUG | 1404 | 11408 | CACAUCUCAGCUGCUCCCC | 3156 |
| rs362301 | 11391 | GGGAGCAGCUGAGAUGUGG | 1405 | 11391 | GGGAGCAGCUGAGAUGUGG | 1405 | 11409 | CCACAUCUCAGCUGCUCCC | 3157 |
| rs362301 | 11392 | GGAGCAGCUGAGAUGUGGA | 1406 | 11392 | GGAGCAGCUGAGAUGUGGA | 1406 | 11410 | UCCACAUCUCAGCUGCUCC | 3158 |
| rs362301 | 11393 | GAGCAGCUGAGAUGUGGAC | 1407 | 11393 | GAGCAGCUGAGAUGUGGAC | 1407 | 11411 | GUCCACAUCUCAGCUGCUC | 3159 |
| rs362301 | 11394 | AGCAGCUGAGAUGUGGACU | 1408 | 11394 | AGCAGCUGAGAUGUGGACU | 1408 | 11412 | AGUCCACAUCUCAGCUGCU | 3160 |
| rs362301 | 11395 | GCAGCUGAGAUGUGGACUU | 1409 | 11395 | GCAGCUGAGAUGUGGACUU | 1409 | 11413 | AAGUCCACAUCUCAGCUGC | 3161 |
| rs362301 | 11396 | CAGCUGAGAUGUGGACUUG | 1410 | 11396 | CAGCUGAGAUGUGGACUUG | 1410 | 11414 | CAAGUCCACAUCUCAGCUG | 3162 |
| rs362301 | 11397 | AGCUGAGAUGUGGACUUGU | 1411 | 11397 | AGCUGAGAUGUGGACUUGU | 1411 | 11415 | ACAAGUCCACAUCUCAGCU | 3163 |
| rs362301 | 11398 | GCUGAGAUGUGGACUUGUA | 1412 | 11398 | GCUGAGAUGUGGACUUGUA | 1412 | 11416 | UACAAGUCCACAUCUCAGC | 3164 |
| rs362301 | 11399 | CUGAGAUGUGGACUUGUAU | 1413 | 11399 | CUGAGAUGUGGACUUGUAU | 1413 | 11417 | AUACAAGUCCACAUCUCAG | 3165 |
| rs362301 | 11400 | UGAGAUGUGGACUUGUAUG | 1414 | 11400 | UGAGAUGUGGACUUGUAUG | 1414 | 11418 | CAUACAAGUCCACAUCUCA | 3166 |
| rs362301 | 11382 | UGGCAGCUGGGGAGCAGCG | 1415 | 11382 | UGGCAGCUGGGGAGCAGCG | 1415 | 11400 | CGCUGCUCCCCAGCUGCCA | 3167 |
| rs362301 | 11383 | GGCAGCUGGGGAGCAGCGG | 1416 | 11383 | GGCAGCUGGGGAGCAGCGG | 1416 | 11401 | CCGCUGCUCCCCAGCUGCC | 3168 |
| rs362301 | 11384 | GCAGCUGGGGAGCAGCGGA | 1417 | 11384 | GCAGCUGGGGAGCAGCGGA | 1417 | 11402 | UCCGCUGCUCCCCAGCUGC | 3169 |
| rs362301 | 11385 | CAGCUGGGGAGCAGCGGAG | 1418 | 11385 | CAGCUGGGGAGCAGCGGAG | 1418 | 11403 | CUCCGCUGCUCCCCAGCUG | 3170 |
| rs362301 | 11386 | AGCUGGGGAGCAGCGGAGA | 1419 | 11386 | AGCUGGGGAGCAGCGGAGA | 1419 | 11404 | UCUCCGCUGCUCCCCAGCU | 3171 |
| rs362301 | 11387 | GCUGGGGAGCAGCGGAGAU | 1420 | 11387 | GCUGGGGAGCAGCGGAGAU | 1420 | 11405 | AUCUCCGCUGCUCCCCAGC | 3172 |
| rs362301 | 11388 | CUGGGGAGCAGCGGAGAUG | 1421 | 11388 | CUGGGGAGCAGCGGAGAUG | 1421 | 11406 | CAUCUCCGCUGCUCCCCAG | 3173 |
| rs362301 | 11389 | UGGGGAGCAGCGGAGAUGU | 1422 | 11389 | UGGGGAGCAGCGGAGAUGU | 1422 | 11407 | ACAUCUCCGCUGCUCCCCA | 3174 |
| rs362301 | 11390 | GGGGAGCAGCGGAGAUGUG | 1423 | 11390 | GGGGAGCAGCGGAGAUGUG | 1423 | 11408 | CACAUCUCCGCUGCUCCCC | 3175 |
| rs362301 | 11391 | GGGAGCAGCGGAGAUGUGG | 1424 | 11391 | GGGAGCAGCGGAGAUGUGG | 1424 | 11409 | CCACAUCUCCGCUGCUCCC | 3176 |
| rs362301 | 11392 | GGAGCAGCGGAGAUGUGGA | 1425 | 11392 | GGAGCAGCGGAGAUGUGGA | 1425 | 11410 | UCCACAUCUCCGCUGCUCC | 3177 |
| rs362301 | 11393 | GAGCAGCGGAGAUGUGGAC | 1426 | 11393 | GAGCAGCGGAGAUGUGGAC | 1426 | 11411 | GUCCACAUCUCCGCUGCUC | 3178 |
| rs362301 | 11394 | AGCAGCGGAGAUGUGGACU | 1427 | 11394 | AGCAGCGGAGAUGUGGACU | 1427 | 11412 | AGUCCACAUCUCCGCUGCU | 3179 |
| rs362301 | 11395 | GCAGCGGAGAUGUGGACUU | 1428 | 11395 | GCAGCGGAGAUGUGGACUU | 1428 | 11413 | AAGUCCACAUCUCCGCUGC | 3180 |
| rs362301 | 11396 | CAGCGGAGAUGUGGACUUG | 1429 | 11396 | CAGCGGAGAUGUGGACUUG | 1429 | 11414 | CAAGUCCACAUCUCCGCUG | 3181 |
| rs362301 | 11397 | AGCGGAGAUGUGGACUUGU | 1430 | 11397 | AGCGGAGAUGUGGACUUGU | 1430 | 11415 | ACAAGUCCACAUCUCCGCU | 3182 |
| rs362301 | 11398 | GCGGAGAUGUGGACUUGUA | 1431 | 11398 | GCGGAGAUGUGGACUUGUA | 1431 | 11416 | UACAAGUCCACAUCUCCGC | 3183 |
| rs362301 | 11399 | CGGAGAUGUGGACUUGUAU | 1432 | 11399 | CGGAGAUGUGGACUUGUAU | 1432 | 11417 | AUACAAGUCCACAUCUCCG | 3184 |
| rs362301 | 11400 | GGAGAUGUGGACUUGUAUG | 1433 | 11400 | GGAGAUGUGGACUUGUAUG | 1433 | 11418 | CAUACAAGUCCACAUCUCC | 3185 |
| rs6148278 | 11440 | AGCUGAAAGGGAGCCCCUG | 1434 | 11440 | AGCUGAAAGGGAGCCCCUG | 1434 | 11458 | CAGGGGCUCCCUUUCAGCU | 3186 |
| rs6148278 | 11441 | GCUGAAAGGGAGCCCCUGC | 1435 | 11441 | GCUGAAAGGGAGCCCCUGC | 1435 | 11459 | GCAGGGGCUCCCUUUCAGC | 3187 |
| rs6148278 | 11442 | CUGAAAGGGAGCCCCUGCU | 1436 | 11442 | CUGAAAGGGAGCCCCUGCU | 1436 | 11460 | AGCAGGGGCUCCCUUUCAG | 3188 |
| rs6148278 | 11443 | UGAAAGGGAGCCCCUGCUC | 1437 | 11443 | UGAAAGGGAGCCCCUGCUC | 1437 | 11461 | GAGCAGGGGCUCCCUUUCA | 3189 |
| rs6148278 | 11444 | GAAAGGGAGCCCCUGCUCA | 1438 | 11444 | GAAAGGGAGCCCCUGCUCA | 1438 | 11462 | UGAGCAGGGGCUCCCUUUC | 3190 |
| rs6148278 | 11445 | AAAGGGAGCCCCUGCUCAA | 1439 | 11445 | AAAGGGAGCCCCUGCUCAA | 1439 | 11463 | UUGAGCAGGGGCUCCCUUU | 3191 |
| rs6148278 | 11446 | AAGGGAGCCCCUGCUCAAA | 1440 | 11446 | AAGGGAGCCCCUGCUCAAA | 1440 | 11464 | UUUGAGCAGGGGCUCCCUU | 3192 |
| rs6148278 | 11447 | AGGGAGCCCCUGCUCAAAG | 1441 | 11447 | AGGGAGCCCCUGCUCAAAG | 1441 | 11465 | CUUUGAGCAGGGGCUCCCU | 3193 |
| rs6148278 | 11448 | GGGAGCCCCUGCUCAAAGG | 1442 | 11448 | GGGAGCCCCUGCUCAAAGG | 1442 | 11466 | CCUUUGAGCAGGGGCUCCC | 3194 |
| rs6148278 | 11449 | GGAGCCCCUGCUCAAAGGG | 1443 | 11449 | GGAGCCCCUGCUCAAAGGG | 1443 | 11467 | CCCUUUGAGCAGGGGCUCC | 3195 |
| rs6148278 | 11450 | GAGCCCCUGCUCAAAGGGA | 1444 | 11450 | GAGCCCCUGCUCAAAGGGA | 1444 | 11468 | UCCCUUUGAGCAGGGGCUC | 3196 |
| rs6148278 | 11451 | AGCCCCUGCUCAAAGGGAG | 1445 | 11451 | AGCCCCUGCUCAAAGGGAG | 1445 | 11469 | CUCCCUUUGAGCAGGGGCU | 3197 |
| rs6148278 | 11452 | GCCCCUGCUCAAAGGGAGC | 1446 | 11452 | GCCCCUGCUCAAAGGGAGC | 1446 | 11470 | GCUCCCUUUGAGCAGGGGC | 3198 |
| rs6148278 | 11453 | CCCCUGCUCAAAGGGAGCC | 1447 | 11453 | CCCCUGCUCAAAGGGAGCC | 1447 | 11471 | GGCUCCCUUUGAGCAGGGG | 3199 |
| rs6148278 | 11454 | CCCUGCUCAAAGGGAGCCC | 1448 | 11454 | CCCUGCUCAAAGGGAGCCC | 1448 | 11472 | GGGCUCCCUUUGAGCAGGG | 3200 |
| rs6148278 | 11455 | CCUGCUCAAAGGGAGCCCC | 1449 | 11455 | CCUGCUCAAAGGGAGCCCC | 1449 | 11473 | GGGGCUCCCUUUGAGCAGG | 3201 |
| rs6148278 | 11456 | CUGCUCAAAGGGAGCCCCU | 1450 | 11456 | CUGCUCAAAGGGAGCCCCU | 1450 | 11474 | AGGGGCUCCCUUUGAGCAG | 3202 |
| rs6148278 | 11457 | UGCUCAAAGGGAGCCCCUC | 1451 | 11457 | UGCUCAAAGGGAGCCCCUC | 1451 | 11475 | GAGGGGCUCCCUUUGAGCA | 3203 |
| rs6148278 | 11458 | GCUCAAAGGGAGCCCCUCC | 1452 | 11458 | GCUCAAAGGGAGCCCCUCC | 1452 | 11476 | GGAGGGGCUCCCUUUGAGC | 3204 |
| rs6148278 | 11459 | CUCAAAGGGAGCCCCUCCU | 1453 | 11459 | CUCAAAGGGAGCCCCUCCU | 1453 | 11477 | AGGAGGGGCUCCCUUUGAG | 3205 |
| rs6148278 | 11460 | UCAAAGGGAGCCCCUCCUC | 1454 | 11460 | UCAAAGGGAGCCCCUCCUC | 1454 | 11478 | GAGGAGGGGCUCCCUUUGA | 3206 |
| rs6148278 | 11461 | CAAAGGGAGCCCCUCCUCU | 1455 | 11461 | CAAAGGGAGCCCCUCCUCU | 1455 | 11479 | AGAGGAGGGGCUCCCUUUG | 3207 |
| rs6148278 | 11440 | AGCUGAAAGGGAGCCCCUC | 1456 | 11440 | AGCUGAAAGGGAGCCCCUC | 1456 | 11458 | GAGGGGCUCCCUUUCAGCU | 3208 |
| rs6148278 | 11441 | GCUGAAAGGGAGCCCCUCC | 1457 | 11441 | GCUGAAAGGGAGCCCCUCC | 1457 | 11459 | GGAGGGGCUCCCUUUCAGC | 3209 |
| rs6148278 | 11442 | CUGAAAGGGAGCCCCUCCU | 1458 | 11442 | CUGAAAGGGAGCCCCUCCU | 1458 | 11460 | AGGAGGGGCUCCCUUUCAG | 3210 |
| rs6148278 | 11443 | UGAAAGGGAGCCCCUCCUC | 1459 | 11443 | UGAAAGGGAGCCCCUCCUC | 1459 | 11461 | GAGGAGGGGCUCCCUUUCA | 3211 |
| rs6148278 | 11444 | GAAAGGGAGCCCCUCCUCU | 1460 | 11444 | GAAAGGGAGCCCCUCCUCU | 1460 | 11462 | AGAGGAGGGGCUCCCUUUC | 3212 |
| rs5855773 | 11641 | GUAAGAAAAUCACCAUUCU | 1461 | 11641 | GUAAGAAAAUCACCAUUCU | 1461 | 11659 | AGAAUGGUGAUUUUCUUAC | 3213 |
| rs5855773 | 11642 | UAAGAAAAUCACCAUUCUU | 1462 | 11642 | UAAGAAAAUCACCAUUCUU | 1462 | 11660 | AAGAAUGGUGAUUUUCUUA | 3214 |
| rs5855773 | 11643 | AAGAAAAUCACCAUUCUUC | 1463 | 11643 | AAGAAAAUCACCAUUCUUC | 1463 | 11661 | GAAGAAUGGUGAUUUUCUU | 3215 |
| rs5855773 | 11644 | AGAAAAUCACCAUUCUUCC | 1464 | 11644 | AGAAAAUCACCAUUCUUCC | 1464 | 11662 | GGAAGAAUGGUGAUUUUCU | 3216 |
| rs5855773 | 11645 | GAAAAUCACCAUUCUUCCG | 1465 | 11645 | GAAAAUCACCAUUCUUCCG | 1465 | 11663 | CGGAAGAAUGGUGAUUUUC | 3217 |
| rs5855773 | 11646 | AAAAUCACCAUUCUUCCGU | 1466 | 11646 | AAAAUCACCAUUCUUCCGU | 1466 | 11664 | ACGGAAGAAUGGUGAUUUU | 3218 |
| rs5855773 | 11647 | AAAUCACCAUUCUUCCGUA | 1467 | 11647 | AAAUCACCAUUCUUCCGUA | 1467 | 11665 | UACGGAAGAAUGGUGAUUU | 3219 |
| rs5855773 | 11648 | AAUCACCAUUCUUCCGUAU | 1468 | 11648 | AAUCACCAUUCUUCCGUAU | 1468 | 11666 | AUACGGAAGAAUGGUGAUU | 3220 |
| rs5855773 | 11649 | AUCACCAUUCUUCCGUAUU | 1469 | 11649 | AUCACCAUUCUUCCGUAUU | 1469 | 11667 | AAUACGGAAGAAUGGUGAU | 3221 |
| rs5855773 | 11650 | UCACCAUUCUUCCGUAUUG | 1470 | 11650 | UCACCAUUCUUCCGUAUUG | 1470 | 11668 | CAAUACGGAAGAAUGGUGA | 3222 |
| rs5855773 | 11651 | CACCAUUCUUCCGUAUUGG | 1471 | 11651 | CACCAUUCUUCCGUAUUGG | 1471 | 11669 | CCAAUACGGAAGAAUGGUG | 3223 |
| rs5855773 | 11652 | ACCAUUCUUCCGUAUUGGU | 1472 | 11652 | ACCAUUCUUCCGUAUUGGU | 1472 | 11670 | ACCAAUACGGAAGAAUGGU | 3224 |
| rs5855773 | 11653 | CCAUUCUUCCGUAUUGGUU | 1473 | 11653 | CCAUUCUUCCGUAUUGGUU | 1473 | 11671 | AACCAAUACGGAAGAAUGG | 3225 |
| rs5855773 | 11654 | CAUUCUUCCGUAUUGGUUG | 1474 | 11654 | CAUUCUUCCGUAUUGGUUG | 1474 | 11672 | CAACCAAUACGGAAGAAUG | 3226 |
| rs5855773 | 11655 | AUUCUUCCGUAUUGGUUGG | 1475 | 11655 | AUUCUUCCGUAUUGGUUGG | 1475 | 11673 | CCAACCAAUACGGAAGPAU | 3227 |
| rs5855773 | 11656 | UUCUUCCGUAUUGGUUGGG | 1476 | 11656 | UUCUUCCGUAUUGGUUGGG | 1476 | 11674 | CCCAACCAAUACGGAAGAA | 3228 |
| rs5855773 | 11641 | GUAAGAAAAUCACCAUUCC | 1477 | 11641 | GUAAGAAAAUCACCAUUCC | 1477 | 11659 | GGAAUGGUGAUUUUCUUAC | 3229 |
| rs5855773 | 11642 | UAAGAAAAUCACCAUUCCG | 1478 | 11642 | UAAGAAAAUCACCAUUCCG | 1478 | 11660 | CGGAAUGGUGAUUUUCUUA | 3230 |
| rs5855773 | 11643 | AAGAAAAUCACCAUUCCGU | 1479 | 11643 | AAGAAAAUCACCAUUCCGU | 1479 | 11661 | ACGGAAUGGUGAUUUUCUU | 3231 |
| rs5855773 | 11644 | AGAAAAUCACCAUUCCGUA | 1480 | 11644 | AGAAAAUCACCAUUCCGUA | 1480 | 11662 | UACGGAAUGGUGAUUUUCU | 3232 |
| rs5855773 | 11645 | GAAAAUCACCAUUCCGUAU | 1481 | 11645 | GAAAAUCACCAUUCCGUAU | 1481 | 11663 | AUACGGAAUGGUGAUUUUC | 3233 |
| rs5855773 | 11646 | AAAAUCACCAUUCCGUAUU | 1482 | 11646 | AAAAUCACCAUUCCGUAUU | 1482 | 11664 | AAUACGGAAUGGUGAUUUU | 3234 |
| rs5855773 | 11647 | AAAUCACCAUUCCGUAUUG | 1483 | 11647 | AAAUCACCAUUCCGUAUUG | 1483 | 11665 | CAAUACGGAAUGGUGAUUU | 3235 |
| rs5855773 | 11648 | AAUCACCAUUCCGUAUUGG | 1484 | 11648 | AAUCACCAUUCCGUAUUGG | 1484 | 11666 | CCAAUACGGAAUGGUGAUU | 3236 |
| rs5855773 | 11649 | AUCACCAUUCCGUAUUGGU | 1485 | 11649 | AUCACCAUUCCGUAUUGGU | 1485 | 11667 | ACCAAUACGGAAUGGUGAU | 3237 |
| rs5855773 | 11650 | UCACCAUUCCGUAUUGGUU | 1486 | 11650 | UCACCAUUCCGUAUUGGUU | 1486 | 11668 | AACCAAUACGGAAUGGUGA | 3238 |
| rs5855773 | 11651 | CACCAUUCCGUAUUGGUUG | 1487 | 11651 | CACCAUUCCGUAUUGGUUG | 1487 | 11669 | CAACCAAUACGGAAUGGUG | 3239 |
| rs5855773 | 11652 | ACCAUUCCGUAUUGGUUGG | 1488 | 11652 | ACCAUUCCGUAUUGGUUGG | 1488 | 11670 | CCAACCAAUACGGAAUGGU | 3240 |
| rs5855773 | 11653 | CCAUUCCGUAUUGGUUGGG | 1489 | 11653 | CCAUUCCGUAUUGGUUGGG | 1489 | 11671 | CCCAACCAAUACGGAAUGG | 3241 |
| rs5855774 | 11740 | AAGUUCUCAGAACUGUUGC | 1490 | 11740 | AAGUUCUCAGAACUGUUGC | 1490 | 11758 | GCAACAGUUCUGAGAACUU | 3242 |
| rs5855774 | 11741 | AGUUCUCAGAACUGUUGCU | 1491 | 11741 | AGUUCUCAGAACUGUUGCU | 1491 | 11759 | AGCAACAGUUCUGAGAACU | 3243 |
| rs5855774 | 11742 | GUUCUCAGAACUGUUGCUG | 1492 | 11742 | GUUCUCAGAACUGUUGCUG | 1492 | 11760 | CAGCAACAGUUCUGAGAAC | 3244 |
| rs5855774 | 11743 | UUCUCAGAACUGUUGCUGC | 1493 | 11743 | UUCUCAGAACUGUUGCUGC | 1493 | 11761 | GCAGCAACAGUUCUGAGAA | 3245 |
| rs5855774 | 11744 | UCUCAGAACUGUUGCUGCU | 1494 | 11744 | UCUCAGAACUGUUGCUGCU | 1494 | 11762 | AGCAGCAACAGUUCUGAGA | 3246 |
| rs5855774 | 11745 | CUCAGAACUGUUGCUGCUC | 1495 | 11745 | CUCAGAACUGUUGCUGCUC | 1495 | 11763 | GAGCAGCAACAGUUCUGAG | 3247 |
| rs5855774 | 11746 | UCAGAACUGUUGCUGCUCC | 1496 | 11746 | UCAGAACUGUUGCUGCUCC | 1496 | 11764 | GGAGCAGCAACAGUUCUGA | 3248 |
| rs5855774 | 11747 | CAGAACUGUUGCUGCUCCC | 1497 | 11747 | CAGAACUGUUGCUGCUCCC | 1497 | 11765 | GGGAGCAGCAACAGUUCUG | 3249 |
| rs5855774 | 11748 | AGAACUGUUGCUGCUCCCC | 1498 | 11748 | AGAACUGUUGCUGCUCCCC | 1498 | 11766 | GGGGAGCAGCAACAGUUCU | 3250 |
| rs5855774 | 11749 | GAACUGUUGCUGCUCCCCA | 1499 | 11749 | GAACUGUUGCUGCUCCCCA | 1499 | 11767 | UGGGGAGCAGCAACAGUUC | 3251 |
| rs5855774 | 11750 | AACUGUUGCUGCUCCCCAC | 1500 | 11750 | AACUGUUGCUGCUCCCCAC | 1500 | 11768 | GUGGGGAGCAGCAACAGUU | 3252 |
| rs5855774 | 11751 | ACUGUUGCUGCUCCCCACC | 1501 | 11751 | ACUGUUGCUGCUCCCCACC | 1501 | 11769 | GGUGGGGAGCAGCAACAGU | 3253 |
| rs5855774 | 11752 | CUGUUGCUGCUCCCCACCC | 1502 | 11752 | CUGUUGCUGCUCCCCACCC | 1502 | 11770 | GGGUGGGGAGCAGCAACAG | 3254 |
| rs5855774 | 11753 | UGUUGCUGCUCCCCACCCG | 1503 | 11753 | UGUUGCUGCUCCCCACCCG | 1503 | 11771 | CGGGUGGGGAGCAGCAACA | 3255 |
| rs5855774 | 11754 | GUUGCUGCUCCCCACCCGC | 1504 | 11754 | GUUGCUGCUCCCCACCCGC | 1504 | 11772 | GCGGGUGGGGAGCAGCAAC | 3256 |
| rs5855774 | 11755 | UUGCUGCUCCCCACCCGCC | 1505 | 11755 | UUGCUGCUCCCCACCCGCC | 1505 | 11773 | GGCGGGUGGGGAGCAGCAA | 3257 |
| rs5855774 | 11756 | UGCUGCUCCCCACCCGCCU | 1506 | 11756 | UGCUGCUCCCCACCCGCCU | 1506 | 11774 | AGGCGGGUGGGGAGCAGCA | 3258 |
| rs5855774 | 11740 | AAGUUCUCAGAACUGUUGG | 1507 | 11740 | AAGUUCUCAGAACUGUUGG | 1507 | 11758 | CCAACAGUUCUGAGAACUU | 3259 |
| rs5855774 | 11741 | AGUUCUCAGAACUGUUGGC | 1508 | 11741 | AGUUCUCAGAACUGUUGGC | 1508 | 11759 | GCCAACAGUUCUGAGAACU | 3260 |
| rs5855774 | 11742 | GUUCUCAGAACUGUUGGCU | 1509 | 11742 | GUUCUCAGAACUGUUGGCU | 1509 | 11760 | AGCCAACAGUUCUGAGAAC | 3261 |
| rs5855774 | 11743 | UUCUCAGAACUGUUGGCUG | 1510 | 11743 | UUCUCAGAACUGUUGGCUG | 1510 | 11761 | CAGCCAACAGUUCUGAGAA | 3262 |
| rs5855774 | 11744 | UCUCAGAACUGUUGGCUGC | 1511 | 11744 | UCUCAGAACUGUUGGCUGC | 1511 | 11762 | GCAGCCAACAGUUCUGAGA | 3263 |
| rs5855774 | 11745 | CUCAGAACUGUUGGCUGCU | 1512 | 11745 | CUCAGAACUGUUGGCUGCU | 1512 | 11763 | AGCAGCCAACAGUUCUGAG | 3264 |
| rs5855774 | 11746 | UCAGAACUGUUGGCUGCUC | 1513 | 11746 | UCAGAACUGUUGGCUGCUC | 1513 | 11764 | GAGCAGCCAACAGUUCUGA | 3265 |
| rs5855774 | 11747 | CAGAACUGUUGGCUGCUCC | 1514 | 11747 | CAGAACUGUUGGCUGCUCC | 1514 | 11765 | GGAGCAGCCAACAGUUCUG | 3266 |
| rs5855774 | 11748 | AGAACUGUUGGCUGCUCCC | 1515 | 11748 | AGAACUGUUGGCUGCUCCC | 1515 | 11766 | GGGAGCAGCCAACAGUUCU | 3267 |
| rs5855774 | 11749 | GAACUGUUGGCUGCUCCCC | 1516 | 11749 | GAACUGUUGGCUGCUCCCC | 1516 | 11767 | GGGGAGCAGCCAACAGUUC | 3268 |
| rs5855774 | 11750 | AACUGUUGGCUGCUCCCCA | 1517 | 11750 | AACUGUUGGCUGCUCCCCA | 1517 | 11768 | UGGGGAGCAGCCAACAGUU | 3269 |
| rs5855774 | 11751 | ACUGUUGGCUGCUCCCCAC | 1518 | 11751 | ACUGUUGGCUGCUCCCCAC | 1518 | 11769 | GUGGGGAGCAGCCAACAGU | 3270 |
| rs5855774 | 11752 | CUGUUGGCUGCUCCCCACC | 1519 | 11752 | CUGUUGGCUGCUCCCCACC | 1519 | 11770 | GGUGGGGAGCAGCCAACAG | 3271 |
| rs5855774 | 11753 | UGUUGGCUGCUCCCCACCC | 1520 | 11753 | UGUUGGCUGCUCCCCACCC | 1520 | 11771 | GGGUGGGGAGCAGCCAACA | 3272 |
| rs5855774 | 11754 | GUUGGCUGCUCCCCACCCG | 1521 | 11754 | GUUGGCUGCUCCCCACCCG | 1521 | 11772 | CGGGUGGGGAGCAGCCAAC | 3273 |
| rs5855774 | 11755 | UUGGCUGCUCCCCACCCGC | 1522 | 11755 | UUGGCUGCUCCCCACCCGC | 1522 | 11773 | GCGGGUGGGGAGCAGCCAA | 3274 |
| rs5855774 | 11756 | UGGCUGCUCCCCACCCGCC | 1523 | 11756 | UGGCUGCUCCCCACCCGCC | 1523 | 11774 | GGCGGGUGGGGAGCAGCCA | 3275 |
| rs5855774 | 11757 | GGCUGCUCCCCACCCGCCU | 1524 | 11757 | GGCUGCUCCCCACCCGCCU | 1524 | 11775 | AGGCGGGUGGGGAGCAGCC | 3276 |
| rs2159172 | 11846 | AGAUGUUUACAUUUGUAAG | 1525 | 11846 | AGAUGUUUACAUUUGUAAG | 1525 | 11864 | CUUACAAAUGUAAACAUCU | 3277 |
| rs2159172 | 11847 | GAUGUUUACAUUUGUAAGA | 1526 | 11847 | GAUGUUUACAUUUGUAAGA | 1526 | 11865 | UCUUACAAAUGUAAACAUC | 3278 |
| rs2159172 | 11848 | AUGUUUACAUUUGUAAGAA | 1527 | 11848 | AUGUUUACAUUUGUAAGAA | 1527 | 11866 | UUCUUACAAAUGUAAACAU | 3279 |
| rs2159172 | 11849 | UGUUUACAUUUGUAAGAAA | 1528 | 11849 | UGUUUACAUUUGUAAGAAA | 1528 | 11867 | UUUCUUACAAAUGUAAACA | 3280 |
| rs2159172 | 11850 | GUUUACAUUUGUAAGAAAU | 1529 | 11850 | GUUUACAUUUGUAAGAAAU | 1529 | 11868 | AUUUCUUACAAAUGUAAAC | 3281 |
| rs2159172 | 11851 | UUUACAUUUGUAAGAAAUA | 1530 | 11851 | UUUACAUUUGUAAGAAAUA | 1530 | 11869 | UAUUUCUUACAAAUGUAAA | 3282 |
| rs2159172 | 11852 | UUACAUUUGUAAGAAAUAA | 1531 | 11852 | UUACAUUUGUAAGAAAUAA | 1531 | 11870 | UUAUUUCUUACAAAUGUAA | 3283 |
| rs2159172 | 11853 | UACAUUUGUAAGAAAUAAC | 1532 | 11853 | UACAUUUGUAAGAAAUAAC | 1532 | 11871 | GUUAUUUCUUACAAAUGUA | 3284 |
| rs2159172 | 11854 | ACAUUUGUAAGAAAUAACA | 1533 | 11854 | ACAUUUGUAAGAAAUAACA | 1533 | 11872 | UGUUAUUUCUUACAAAUGU | 3285 |
| rs2159172 | 11855 | CAUUUGUAAGAAAUAACAC | 1534 | 11855 | CAUUUGUAAGAAAUAACAC | 1534 | 11873 | GUGUUAUUUCUUACAAAUG | 3286 |
| rs2159172 | 11856 | AUUUGUAAGAAAUAACACU | 1535 | 11856 | AUUUGUAAGAAAUAACACU | 1535 | 11874 | AGUGUUAUUUCUUACAAAU | 3287 |
| rs2159172 | 11857 | UUUGUAAGAAAUAACACUG | 1536 | 11857 | UUUGUAAGAAAUAACACUG | 1536 | 11875 | CAGUGUUAUUUCUUACAAA | 3288 |
| rs2159172 | 11858 | UUGUAAGAAAUAACACUGU | 1537 | 11858 | UUGUAAGAAAUAACACUGU | 1537 | 11876 | ACAGUGUUAUUUCUUACAA | 3289 |
| rs2159172 | 11859 | UGUAAGAAAUAACACUGUG | 1538 | 11859 | UGUAAGAAAUAACACUGUG | 1538 | 11877 | CACAGUGUUAUUUCUUACA | 3290 |
| rs2159172 | 11860 | GUAAGAAAUAACACUGUGA | 1539 | 11860 | GUAAGAAAUAACACUGUGA | 1539 | 11878 | UCACAGUGUUAUUUCUUAC | 3291 |
| rs2159172 | 11861 | UAAGAAAUAACACUGUGAA | 1540 | 11861 | UAAGAAAUAACACUGUGAA | 1540 | 11879 | UUCACAGUGUUAUUUCUUA | 3292 |
| rs2159172 | 11862 | AAGAAAUAACACUGUGAAU | 1541 | 11862 | AAGAAAUAACACUGUGAAU | 1541 | 11880 | AUUCACAGUGUUAUUUCUU | 3293 |
| rs2159172 | 11863 | AGAAAUAACACUGUGAAUG | 1542 | 11863 | AGAAAUAACACUGUGAAUG | 1542 | 11881 | CAUUCACAGUGUUAUUUCU | 3294 |
| rs2159172 | 11864 | GAAAUAACACUGUGAAUGU | 1543 | 11864 | GAAAUAACACUGUGAAUGU | 1543 | 11882 | ACAUUCACAGUGUUAUUUC | 3295 |
| rs2159172 | 11846 | AGAUGUUUACAUUUGUAAA | 1544 | 11846 | AGAUGUUUACAUUUGUAAA | 1544 | 11864 | UUUACAAAUGUAAACAUCU | 3296 |
| rs2159172 | 11847 | GAUGUUUACAUUUGUAAAA | 1545 | 11847 | GAUGUUUACAUUUGUAAAA | 1545 | 11865 | UUUUACAAAUGUAAACAUC | 3297 |
| rs2159172 | 11848 | AUGUUUACAUUUGUAAAAA | 1546 | 11848 | AUGUUUACAUUUGUAAAAA | 1546 | 11866 | UUUUUACAAAUGUAAACAU | 3298 |
| rs2159172 | 11849 | UGUUUACAUUUGUAAAAAA | 1547 | 11849 | UGUUUACAUUUGUAAAAAA | 1547 | 11867 | UUUUUUACAAAUGUAAACA | 3299 |
| rs2159172 | 11850 | GUUUACAUUUGUAAAAAAU | 1548 | 11850 | GUUUACAUUUGUAAAAAAU | 1548 | 11868 | AUUUUUUACAAAUGUAAAC | 3300 |
| rs2159172 | 11851 | UUUACAUUUGUAAAAAAUA | 1549 | 11851 | UUUACAUUUGUAAAAAAUA | 1549 | 11869 | UAUUUUUUACAAAUGUAAA | 3301 |
| rs2159172 | 11852 | UUACAUUUGUAAAAAAUAA | 1550 | 11852 | UUACAUUUGUAAAAAAUAA | 1550 | 11870 | UUAUUUUUUACAAAUGUAA | 3302 |
| rs2159172 | 11853 | UACAUUUGUAAAAAAUAAC | 1551 | 11853 | UACAUUUGUAAAAAAUAAC | 1551 | 11871 | GUUAUUUUUUACAAAUGUA | 3303 |
| rs2159172 | 11854 | ACAUUUGUAAAAAAUAACA | 1552 | 11854 | ACAUUUGUAAAAAAUAACA | 1552 | 11872 | UGUUAUUUUUUACAAAUGU | 3304 |
| rs2159172 | 11855 | CAUUUGUAAAAAAUAACAC | 1553 | 11855 | CAUUUGUAAAAAAUAACAC | 1553 | 11873 | GUGUUAUUUUUUACAAAUG | 3305 |
| rs2159172 | 11856 | AUUUGUAAAAAAUAACACU | 1554 | 11856 | AUUUGUAAAAAAUAACACU | 1554 | 11874 | AGUGUUAUUUUUUACAAAU | 3306 |
| rs2159172 | 11857 | UUUGUAAAAAAUAACACUG | 1555 | 11857 | UUUGUAAAAAAUAACACUG | 1555 | 11875 | CAGUGUUAUUUUUUACAAA | 3307 |
| rs2159172 | 11858 | UUGUAAAAAAUAACACUGU | 1556 | 11858 | UUGUAAAAAAUAACACUGU | 1556 | 11876 | ACAGUGUUAUUUUUUACAA | 3308 |
| rs2159172 | 11859 | UGUAAAAAAUAACACUGUG | 1557 | 11859 | UGUAAAAAAUAACACUGUG | 1557 | 11877 | CACAGUGUUAUUUUUUACA | 3309 |
| rs2159172 | 11860 | GUAAAAAAUAACACUGUGA | 1558 | 11860 | GUAAAAAAUAACACUGUGA | 1558 | 11878 | UCACAGUGUUAUUUUUUAC | 3310 |
| rs2159172 | 11861 | UAAAAAAUAACACUGUGAA | 1559 | 11861 | UAAAAAAUAACACUGUGAA | 1559 | 11879 | UUCACAGUGUUAUUUUUUA | 3311 |
| rs2159172 | 11862 | AAAAAAUAACACUGUGAAU | 1560 | 11862 | AAAAAAUAACACUGUGAAU | 1560 | 11880 | AUUCACAGUGUUAUUUUUU | 3312 |
| rs2159172 | 11863 | AAAAAUAACACUGUGAAUG | 1561 | 11863 | AAAAAUAACACUGUGAAUG | 1561 | 11881 | CAUUCACAGUGUUAUUUUU | 3313 |
| rs2159172 | 11864 | AAAAUAACACUGUGAAUGU | 1562 | 11864 | AAAAUAACACUGUGAAUGU | 1562 | 11882 | ACAUUCACAGUGUUAUUUU | 3314 |
| rs2237008 | 12640 | ACCCUCAUUUCUGCCAGCG | 1563 | 12640 | ACCCUCAUUUCUGCCAGCG | 1563 | 12658 | CGCUGGCAGAAAUGAGGGU | 3315 |
| rs2237008 | 12641 | CCCUCAUUUCUGCCAGCGC | 1564 | 12641 | CCCUCAUUUCUGCCAGCGC | 1564 | 12659 | GCGCUGGCAGAAAUGAGGG | 3316 |
| rs2237008 | 12642 | CCUCAUUUCUGCCAGCGCA | 1565 | 12642 | CCUCAUUUCUGCCAGCGCA | 1565 | 12660 | UGCGCUGGCAGAAAUGAGG | 3317 |
| rs2237008 | 12643 | CUCAUUUCUGCCAGCGCAU | 1566 | 12643 | CUCAUUUCUGCCAGCGCAU | 1566 | 12661 | AUGCGCUGGCAGAAAUGAG | 3318 |
| rs2237008 | 12644 | UCAUUUCUGCCAGCGCAUG | 1567 | 12644 | UCAUUUCUGCCAGCGCAUG | 1567 | 12662 | CAUGCGCUGGCAGAAAUGA | 3319 |
| rs2237008 | 12645 | CAUUUCUGCCAGCGCAUGU | 1568 | 12645 | CAUUUCUGCCAGCGCAUGU | 1568 | 12663 | ACAUGCGCUGGCAGAAAUG | 3320 |
| rs2237008 | 12646 | AUUUCUGCCAGCGCAUGUG | 1569 | 12646 | AUUUCUGCCAGCGCAUGUG | 1569 | 12664 | CACAUGCGCUGGCAGAAAU | 3321 |
| rs2237008 | 12647 | UUUCUGCCAGCGCAUGUGU | 1570 | 12647 | UUUCUGCCAGCGCAUGUGU | 1570 | 12665 | ACACAUGCGCUGGCAGAAA | 3322 |
| rs2237008 | 12648 | UUCUGCCAGCGCAUGUGUC | 1571 | 12648 | UUCUGCCAGCGCAUGUGUC | 1571 | 12666 | GACACAUGCGCUGGCAGAA | 3323 |
| rs2237008 | 12649 | UCUGCCAGCGCAUGUGUCC | 1572 | 12649 | UCUGCCAGCGCAUGUGUCC | 1572 | 12667 | GGACACAUGCGCUGGCAGA | 3324 |
| rs2237008 | 12650 | CUGCCAGCGCAUGUGUCCU | 1573 | 12650 | CUGCCAGCGCAUGUGUCCU | 1573 | 12668 | AGGACACAUGCGCUGGCAG | 3325 |
| rs2237008 | 12651 | UGCCAGCGCAUGUGUCCUU | 1574 | 12651 | UGCCAGCGCAUGUGUCCUU | 1574 | 12669 | AAGGACACAUGCGCUGGCA | 3326 |
| rs2237008 | 12652 | GCCAGCGCAUGUGUCCUUU | 1575 | 12652 | GCCAGCGCAUGUGUCCUUU | 1575 | 12670 | AAAGGACACAUGCGCUGGC | 3327 |
| rs2237008 | 12653 | CCAGCGCAUGUGUCCUUUC | 1576 | 12653 | CCAGCGCAUGUGUCCUUUC | 1576 | 12671 | GAAAGGACACAUGCGCUGG | 3328 |
| rs2237008 | 12654 | CAGCGCAUGUGUCCUUUCA | 1577 | 12654 | CAGCGCAUGUGUCCUUUCA | 1577 | 12672 | UGAAAGGACACAUGCGCUG | 3329 |
| rs2237008 | 12655 | AGCGCAUGUGUCCUUUCAA | 1578 | 12655 | AGCGCAUGUGUCCUUUCAA | 1578 | 12673 | UUGAAAGGACACAUGCGCU | 3330 |
| rs2237008 | 12656 | GCGCAUGUGUCCUUUCAAG | 1579 | 12656 | GCGCAUGUGUCCUUUCAAG | 1579 | 12674 | CUUGAAAGGACACAUGCGC | 3331 |
| rs2237008 | 12657 | CGCAUGUGUCCUUUCAAGG | 1580 | 12657 | CGCAUGUGUCCUUUCAAGG | 1580 | 12675 | CCUUGAAAGGACACAUGCG | 3332 |
| rs2237008 | 12658 | GCAUGUGUCCUUUCAAGGG | 1581 | 12658 | GCAUGUGUCCUUUCAAGGG | 1581 | 12676 | CCCUUGAAAGGACACAUGC | 3333 |
| rs2237008 | 12640 | ACCCUCAUUUCUGCCAGCA | 1582 | 12640 | ACCCUCAUUUCUGCCAGCA | 1582 | 12658 | UGCUGGCAGAAAUGAGGGU | 3334 |
| rs2237008 | 12641 | CCCUCAUUUCUGCCAGCAC | 1583 | 12641 | CCCUCAUUUCUGCCAGCAC | 1583 | 12659 | GUGCUGGCAGAAAUGAGGG | 3335 |
| rs2237008 | 12642 | CCUCAUUUCUGCCAGCACA | 1584 | 12642 | CCUCAUUUCUGCCAGCACA | 1584 | 12660 | UGUGCUGGCAGAAAUGAGG | 3336 |
| rs2237008 | 12643 | CUCAUUUCUGCCAGCACAU | 1585 | 12643 | CUCAUUUCUGCCAGCACAU | 1585 | 12661 | AUGUGCUGGCAGAAAUGAG | 3337 |
| rs2237008 | 12644 | UCAUUUCUGCCAGCACAUG | 1586 | 12644 | UCAUUUCUGCCAGCACAUG | 1586 | 12662 | CAUGUGCUGGCAGAAAUGA | 3338 |
| rs2237008 | 12645 | CAUUUCUGCCAGCACAUGU | 1587 | 12645 | CAUUUCUGCCAGCACAUGU | 1587 | 12663 | ACAUGUGCUGGCAGAAAUG | 3339 |
| rs2237008 | 12646 | AUUUCUGCCAGCACAUGUG | 1588 | 12646 | AUUUCUGCCAGCACAUGUG | 1588 | 12664 | CACAUGUGCUGGCAGAAAU | 3340 |
| rs2237008 | 12647 | UUUCUGCCAGCACAUGUGU | 1589 | 12647 | UUUCUGCCAGCACAUGUGU | 1589 | 12665 | ACACAUGUGCUGGCAGAAA | 3341 |
| rs2237008 | 12648 | UUCUGCCAGCACAUGUGUC | 1590 | 12648 | UUCUGCCAGCACAUGUGUC | 1590 | 12666 | GACACAUGUGCUGGCAGAA | 3342 |
| rs2237008 | 12649 | UCUGCCAGCACAUGUGUCC | 1591 | 12649 | UCUGCCAGCACAUGUGUCC | 1591 | 12667 | GGACACAUGUGCUGGCAGA | 3343 |
| rs2237008 | 12650 | CUGCCAGCACAUGUGUCCU | 1592 | 12650 | CUGCCAGCACAUGUGUCCU | 1592 | 12668 | AGGACACAUGUGCUGGCAG | 3344 |
| rs2237008 | 12651 | UGCCAGCACAUGUGUCCUU | 1593 | 12651 | UGCCAGCACAUGUGUCCUU | 1593 | 12669 | AAGGACACAUGUGCUGGCA | 3345 |
| rs2237008 | 12652 | GCCAGCACAUGUGUCCUUU | 1594 | 12652 | GCCAGCACAUGUGUCCUUU | 1594 | 12670 | AAAGGACACAUGUGCUGGC | 3346 |
| rs2237008 | 12653 | CCAGCACAUGUGUCCUUUC | 1595 | 12653 | CCAGCACAUGUGUCCUUUC | 1595 | 12671 | GAAAGGACACAUGUGCUGG | 3347 |
| rs2237008 | 12654 | CAGCACAUGUGUCCUUUCA | 1596 | 12654 | CAGCACAUGUGUCCUUUCA | 1596 | 12672 | UGAAAGGACACAUGUGCUG | 3348 |
| rs2237008 | 12655 | AGCACAUGUGUCCUUUCAA | 1597 | 12655 | AGCACAUGUGUCCUUUCAA | 1597 | 12673 | UUGAAAGGACACAUGUGCU | 3349 |
| rs2237008 | 12656 | GCACAUGUGUCCUUUCAAG | 1598 | 12656 | GCACAUGUGUCCUUUCAAG | 1598 | 12674 | CUUGAAAGGACACAUGUGC | 3350 |
| rs2237008 | 12657 | CACAUGUGUCCUUUCAAGG | 1599 | 12657 | CACAUGUGUCCUUUCAAGG | 1599 | 12675 | CCUUGAAAGGACACAUGUG | 3351 |
| rs2237008 | 12658 | ACAUGUGUCCUUUCAAGGG | 1600 | 12658 | ACAUGUGUCCUUUCAAGGG | 1600 | 12676 | CCCUUGAAAGGACACAUGU | 3352 |
| rs362300 | 12893 | CAGGUGGAACUUCCUCCCG | 1601 | 12893 | CAGGUGGAACUUCCUCCCG | 1601 | 12911 | CGGGAGGAAGUUCCACCUG | 3353 |
| rs362300 | 12894 | AGGUGGAACUUCCUCCCGU | 1602 | 12894 | AGGUGGAACUUCCUCCCGU | 1602 | 12912 | ACGGGAGGAAGUUCCACCU | 3354 |
| rs362300 | 12895 | GGUGGAACUUCCUCCCGUU | 1603 | 12895 | GGUGGAACUUCCUCCCGUU | 1603 | 12913 | AACGGGAGGAAGUUCCACC | 3355 |
| rs362300 | 12896 | GUGGAACUUCCUCCCGUUG | 1604 | 12896 | GUGGAACUUCCUCCCGUUG | 1604 | 12914 | CAACGGGAGGAAGUUCCAC | 3356 |
| rs362300 | 12897 | UGGAACUUCCUCCCGUUGC | 1605 | 12897 | UGGAACUUCCUCCCGUUGC | 1605 | 12915 | GCAACGGGAGGAAGUUCCA | 3357 |
| rs362300 | 12898 | GGAACUUCCUCCCGUUGCG | 1606 | 12898 | GGAACUUCCUCCCGUUGCG | 1606 | 12916 | CGCAACGGGAGGAAGUUCC | 3358 |
| rs362300 | 12899 | GAACUUCCUCCCGUUGCGG | 1607 | 12899 | GAACUUCCUCCCGUUGCGG | 1607 | 12917 | CCGCAACGGGAGGAAGUUC | 3359 |
| rs362300 | 12900 | AACUUCCUCCCGUUGCGGG | 1608 | 12900 | AACUUCCUCCCGUUGCGGG | 1608 | 12918 | CCCGCAACGGGAGGAAGUU | 3360 |
| rs362300 | 12901 | ACUUCCUCCCGUUGCGGGG | 1609 | 12901 | ACUUCCUCCCGUUGCGGGG | 1609 | 12919 | CCCCGCAACGGGAGGAAGU | 3361 |
| rs362300 | 12902 | CUUCCUCCCGUUGCGGGGU | 1610 | 12902 | CUUCCUCCCGUUGCGGGGU | 1610 | 12920 | ACCCCGCAACGGGAGGAAG | 3362 |
| rs362300 | 12903 | UUCCUCCCGUUGCGGGGUG | 1611 | 12903 | UUCCUCCCGUUGCGGGGUG | 1611 | 12921 | CACCCCGCAACGGGAGGAA | 3363 |
| rs362300 | 12904 | UCCUCCCGUUGCGGGGUGG | 1612 | 12904 | UCCUCCCGUUGCGGGGUGG | 1612 | 12922 | CCACCCCGCAACGGGAGGA | 3364 |
| rs362300 | 12905 | CCUCCCGUUGCGGGGUGGA | 1613 | 12905 | CCUCCCGUUGCGGGGUGGA | 1613 | 12923 | UCCACCCCGCAACGGGAGG | 3365 |
| rs362300 | 12906 | CUCCCGUUGCGGGGUGGAG | 1614 | 12906 | CUCCCGUUGCGGGGUGGAG | 1614 | 12924 | CUCCACCCCGCAACGGGAG | 3366 |
| rs362300 | 12907 | UCCCGUUGCGGGGUGGAGU | 1615 | 12907 | UCCCGUUGCGGGGUGGAGU | 1615 | 12925 | ACUCCACCCCGCAACGGGA | 3367 |
| rs362300 | 12908 | CCCGUUGCGGGGUGGAGUG | 1616 | 12908 | CCCGUUGCGGGGUGGAGUG | 1616 | 12926 | CACUCCACCCCGCAACGGG | 3368 |
| rs362300 | 12909 | CCGUUGCGGGGUGGAGUGA | 1617 | 12909 | CCGUUGCGGGGUGGAGUGA | 1617 | 12927 | UCACUCCACCCCGCAACGG | 3369 |
| rs362300 | 12910 | CGUUGCGGGGUGGAGUGAG | 1618 | 12910 | CGUUGCGGGGUGGAGUGAG | 1618 | 12928 | CUCACUCCACCCCGCAACG | 3370 |
| rs362300 | 12911 | GUUGCGGGGUGGAGUGAGG | 1619 | 12911 | GUUGCGGGGUGGAGUGAGG | 1619 | 12929 | CCUCACUCCACCCCGCAAC | 3371 |
| rs362300 | 12893 | CAGGUGGAACUUCCUCCCA | 1620 | 12893 | CAGGUGGAACUUCCUCCCA | 1620 | 12911 | UGGGAGGAAGUUCCACCUG | 3372 |
| rs362300 | 12894 | AGGUGGAACUUCCUCCCAU | 1621 | 12894 | AGGUGGAACUUCCUCCCAU | 1621 | 12912 | AUGGGAGGAAGUUCCACCU | 3373 |
| rs362300 | 12895 | GGUGGAACUUCCUCCCAUU | 1622 | 12895 | GGUGGAACUUCCUCCCAUU | 1622 | 12913 | AAUGGGAGGAAGUUCCACC | 3374 |
| rs362300 | 12896 | GUGGAACUUCCUCCCAUUG | 1623 | 12896 | GUGGAACUUCCUCCCAUUG | 1623 | 12914 | CAAUGGGAGGAAGUUCCAC | 3375 |
| rs362300 | 12897 | UGGAACUUCCUCCCAUUGC | 1624 | 12897 | UGGAACUUCCUCCCAUUGC | 1624 | 12915 | GCAAUGGGAGGAAGUUCCA | 3376 |
| rs362300 | 12898 | GGAACUUCCUCCCAUUGCG | 1625 | 12898 | GGAACUUCCUCCCAUUGCG | 1625 | 12916 | CGCAAUGGGAGGAAGUUCC | 3377 |
| rs362300 | 12899 | GAACUUCCUCCCAUUGCGG | 1626 | 12899 | GAACUUCCUCCCAUUGCGG | 1626 | 12917 | CCGCAAUGGGAGGAAGUUC | 3378 |
| rs362300 | 12900 | AACUUCCUCCCAUUGCGGG | 1627 | 12900 | AACUUCCUCCCAUUGCGGG | 1627 | 12918 | CCCGCAAUGGGAGGAAGUU | 3379 |
| rs362300 | 12901 | ACUUCCUCCCAUUGCGGGG | 1628 | 12901 | ACUUCCUCCCAUUGCGGGG | 1628 | 12919 | CCCCGCAAUGGGAGGAAGU | 3380 |
| rs362300 | 12902 | CUUCCUCCCAUUGCGGGGU | 1629 | 12902 | CUUCCUCCCAUUGCGGGGU | 1629 | 12920 | ACCCCGCAAUGGGAGGAAG | 3381 |
| rs362300 | 12903 | UUCCUCCCAUUGCGGGGUG | 1630 | 12903 | UUCCUCCCAUUGCGGGGUG | 1630 | 12921 | CACCCCGCAAUGGGAGGAA | 3382 |
| rs362300 | 12904 | UCCUCCCAUUGCGGGGUGG | 1631 | 12904 | UCCUCCCAUUGCGGGGUGG | 1631 | 12922 | CCACCCCGCAAUGGGAGGA | 3383 |
| rs362300 | 12905 | CCUCCCAUUGCGGGGUGGA | 1632 | 12905 | CCUCCCAUUGCGGGGUGGA | 1632 | 12923 | UCCACCCCGCAAUGGGAGG | 3384 |
| rs362300 | 12906 | CUCCCAUUGCGGGGUGGAG | 1633 | 12906 | CUCCCAUUGCGGGGUGGAG | 1633 | 12924 | CUCCACCCCGCAAUGGGAG | 3385 |
| rs362300 | 12907 | UCCCAUUGCGGGGUGGAGU | 1634 | 12907 | UCCCAUUGCGGGGUGGAGU | 1634 | 12925 | ACUCCACCCCGCAAUGGGA | 3386 |
| rs362300 | 12908 | CCCAUUGCGGGGUGGAGUG | 1635 | 12908 | CCCAUUGCGGGGUGGAGUG | 1635 | 12926 | CACUCCACCCCGCAAUGGG | 3387 |
| rs362300 | 12909 | CCAUUGCGGGGUGGAGUGA | 1636 | 12909 | CCAUUGCGGGGUGGAGUGA | 1636 | 12927 | UCACUCCACCCCGCAAUGG | 3388 |
| rs362300 | 12910 | CAUUGCGGGGUGGAGUGAG | 1637 | 12910 | CAUUGCGGGGUGGAGUGAG | 1637 | 12928 | CUCACUCCACCCCGCAAUG | 3389 |
| rs362300 | 12911 | AUUGCGGGGUGGAGUGAGG | 1638 | 12911 | AUUGCGGGGUGGAGUGAGG | 1638 | 12929 | CCUCACUCCACCCCGCAAU | 3390 |
| rs2530595 | 13022 | CCCCGCUUCCUCCCUCUGC | 1639 | 13022 | CCCCGCUUCCUCCCUCUGC | 1639 | 13040 | GCAGAGGGAGGAAGCGGGG | 3391 |
| rs2530595 | 13023 | CCCGCUUCCUCCCUCUGCG | 1640 | 13023 | CCCGCUUCCUCCCUCUGCG | 1640 | 13041 | CGCAGAGGGAGGAAGCGGG | 3392 |
| rs2530595 | 13024 | CCGCUUCCUCCCUCUGCGG | 1641 | 13024 | CCGCUUCCUCCCUCUGCGG | 1641 | 13042 | CCGCAGAGGGAGGAAGCGG | 3393 |
| rs2530595 | 13025 | CGCUUCCUCCCUCUGCGGG | 1642 | 13025 | CGCUUCCUCCCUCUGCGGG | 1642 | 13043 | CCCGCAGAGGGAGGAAGCG | 3394 |
| rs2530595 | 13026 | GCUUCCUCCCUCUGCGGGG | 1643 | 13026 | GCUUCCUCCCUCUGCGGGG | 1643 | 13044 | CCCCGCAGAGGGAGGAAGC | 3395 |
| rs2530595 | 13027 | CUUCCUCCCUCUGCGGGGA | 1644 | 13027 | CUUCCUCCCUCUGCGGGGA | 1644 | 13045 | UCCCCGCAGAGGGAGGAAG | 3396 |
| rs2530595 | 13028 | UUCCUCCCUCUGCGGGGAG | 1645 | 13028 | UUCCUCCCUCUGCGGGGAG | 1645 | 13046 | CUCCCCGCAGAGGGAGGAA | 3397 |
| rs2530595 | 13029 | UCCUCCCUCUGCGGGGAGG | 1646 | 13029 | UCCUCCCUCUGCGGGGAGG | 1646 | 13047 | CCUCCCCGCAGAGGGAGGA | 3398 |
| rs2530595 | 13030 | CCUCCCUCUGCGGGGAGGA | 1647 | 13030 | CCUCCCUCUGCGGGGAGGA | 1647 | 13048 | UCCUCCCCGCAGAGGGAGG | 3399 |
| rs2530595 | 13031 | CUCCCUCUGCGGGGAGGAC | 1648 | 13031 | CUCCCUCUGCGGGGAGGAC | 1648 | 13049 | GUCCUCCCCGCAGAGGGAG | 3400 |
| rs2530595 | 13032 | UCCCUCUGCGGGGAGGACC | 1649 | 13032 | UCCCUCUGCGGGGAGGACC | 1649 | 13050 | GGUCCUCCCCGCAGAGGGA | 3401 |
| rs2530595 | 13033 | CCCUCUGCGGGGAGGACCC | 1650 | 13033 | CCCUCUGCGGGGAGGACCC | 1650 | 13051 | GGGUCCUCCCCGCAGAGGG | 3402 |
| rs2530595 | 13034 | CCUCUGCGGGGAGGACCCG | 1651 | 13034 | CCUCUGCGGGGAGGACCCG | 1651 | 13052 | CGGGUCCUCCCCGCAGAGG | 3403 |
| rs2530595 | 13035 | CUCUGCGGGGAGGACCCGG | 1652 | 13035 | CUCUGCGGGGAGGACCCGG | 1652 | 13053 | CCGGGUCCUCCCCGCAGAG | 3404 |
| rs2530595 | 13036 | UCUGCGGGGAGGACCCGGG | 1653 | 13036 | UCUGCGGGGAGGACCCGGG | 1653 | 13054 | CCCGGGUCCUCCCCGCAGA | 3405 |
| rs2530595 | 13037 | CUGCGGGGAGGACCCGGGA | 1654 | 13037 | CUGCGGGGAGGACCCGGGA | 1654 | 13055 | UCCCGGGUCCUCCCCGCAG | 3406 |
| rs2530595 | 13038 | UGCGGGGAGGACCCGGGAC | 1655 | 13038 | UGCGGGGAGGACCCGGGAC | 1655 | 13056 | GUCCCGGGUCCUCCCCGCA | 3407 |
| rs2530595 | 13039 | GCGGGGAGGACCCGGGACC | 1656 | 13039 | GCGGGGAGGACCCGGGACC | 1656 | 13057 | GGUCCCGGGUCCUCCCCGC | 3408 |
| rs2530595 | 13040 | CGGGGAGGACCCGGGACCA | 1657 | 13040 | CGGGGAGGACCCGGGACCA | 1657 | 13058 | UGGUCCCGGGUCCUCCCCG | 3409 |
| rs2530595 | 13022 | CCCCGCUUCCUCCCUCUGU | 1658 | 13022 | CCCCGCUUCCUCCCUCUGU | 1658 | 13040 | ACAGAGGGAGGAAGCGGGG | 3410 |
| rs2530595 | 13023 | CCCGCUUCCUCCCUCUGUG | 1659 | 13023 | CCCGCUUCCUCCCUCUGUG | 1659 | 13041 | CACAGAGGGAGGAAGCGGG | 3411 |
| rs2530595 | 13024 | CCGCUUCCUCCCUCUGUGG | 1660 | 13024 | CCGCUUCCUCCCUCUGUGG | 1660 | 13042 | CCACAGAGGGAGGAAGCGG | 3412 |
| rs2530595 | 13025 | CGCUUCCUCCCUCUGUGGG | 1661 | 13025 | CGCUUCCUCCCUCUGUGGG | 1661 | 13043 | CCCACAGAGGGAGGAAGCG | 3413 |
| rs2530595 | 13026 | GCUUCCUCCCUCUGUGGGG | 1662 | 13026 | GCUUCCUCCCUCUGUGGGG | 1662 | 13044 | CCCCACAGAGGGAGGAAGC | 3414 |
| rs2530595 | 13027 | CUUCCUCCCUCUGUGGGGA | 1663 | 13027 | CUUCCUCCCUCUGUGGGGA | 1663 | 13045 | UCCCCACAGAGGGAGGAAG | 3415 |
| rs2530595 | 13028 | UUCCUCCCUCUGUGGGGAG | 1664 | 13028 | UUCCUCCCUCUGUGGGGAG | 1664 | 13046 | CUCCCCACAGAGGGAGGAA | 3416 |
| rs2530595 | 13029 | UCCUCCCUCUGUGGGGAGG | 1665 | 13029 | UCCUCCCUCUGUGGGGAGG | 1665 | 13047 | CCUCCCCACAGAGGGAGGA | 3417 |
| rs2530595 | 13030 | CCUCCCUCUGUGGGGAGGA | 1666 | 13030 | CCUCCCUCUGUGGGGAGGA | 1666 | 13048 | UCCUCCCCACAGAGGGAGG | 3418 |
| rs2530595 | 13031 | CUCCCUCUGUGGGGAGGAC | 1667 | 13031 | CUCCCUCUGUGGGGAGGAC | 1667 | 13049 | GUCCUCCCCACAGAGGGAG | 3419 |
| rs2530595 | 13032 | UCCCUCUGUGGGGAGGACC | 1668 | 13032 | UCCCUCUGUGGGGAGGACC | 1668 | 13050 | GGUCCUCCCCACAGAGGGA | 3420 |
| rs2530595 | 13033 | CCCUCUGUGGGGAGGACCC | 1669 | 13033 | CCCUCUGUGGGGAGGACCC | 1669 | 13051 | GGGUCCUCCCCACAGAGGG | 3421 |
| rs2530595 | 13034 | CCUCUGUGGGGAGGACCCG | 1670 | 13034 | CCUCUGUGGGGAGGACCCG | 1670 | 13052 | CGGGUCCUCCCCACAGAGG | 3422 |
| rs2530595 | 13035 | CUCUGUGGGGAGGACCCGG | 1671 | 13035 | CUCUGUGGGGAGGACCCGG | 1671 | 13053 | CCGGGUCCUCCCCACAGAG | 3423 |
| rs2530595 | 13036 | UCUGUGGGGAGGACCCGGG | 1672 | 13036 | UCUGUGGGGAGGACCCGGG | 1672 | 13054 | CCCGGGUCCUCCCCACAGA | 3424 |
| rs2530595 | 13037 | CUGUGGGGAGGACCCGGGA | 1673 | 13037 | CUGUGGGGAGGACCCGGGA | 1673 | 13055 | UCCCGGGUCCUCCCCACAG | 3425 |
| rs2530595 | 13038 | UGUGGGGAGGACCCGGGAC | 1674 | 13038 | UGUGGGGAGGACCCGGGAC | 1674 | 13056 | GUCCCGGGUCCUCCCCACA | 3426 |
| rs2530595 | 13039 | GUGGGGAGGACCCGGGACC | 1675 | 13039 | GUGGGGAGGACCCGGGACC | 1675 | 13057 | GGUCCCGGGUCCUCCCCAC | 3427 |
| rs2530595 | 13040 | UGGGGAGGACCCGGGACCA | 1676 | 13040 | UGGGGAGGACCCGGGACCA | 1676 | 13058 | UGGUCCCGGGUCCUCCCCA | 3428 |
| rs1803770 | 13464 | CUGCUUUGCACCGUGGUCA | 1677 | 13464 | CUGCUUUGCACCGUGGUCA | 1677 | 13482 | UGACCACGGUGCAAAGCAG | 3429 |
| rs1803770 | 13465 | UGCUUUGCACCGUGGUCAG | 1678 | 13465 | UGCUUUGCACCGUGGUCAG | 1678 | 13483 | CUGACCACGGUGCAAAGCA | 3430 |
| rs1803770 | 13466 | GCUUUGCACCGUGGUCAGA | 1679 | 13466 | GCUUUGCACCGUGGUCAGA | 1679 | 13484 | UCUGACCACGGUGCAAAGC | 3431 |
| rs1803770 | 13467 | CUUUGCACCGUGGUCAGAG | 1680 | 13467 | CUUUGCACCGUGGUCAGAG | 1680 | 13485 | CUCUGACCACGGUGCPAAG | 3432 |
| rs1803770 | 13468 | UUUGCACCGUGGUCAGAGG | 1681 | 13468 | UUUGCACCGUGGUCAGAGG | 1681 | 13486 | CCUCUGACCACGGUGCAAA | 3433 |
| rs1803770 | 13469 | UUGCACCGUGGUCAGAGGG | 1682 | 13469 | UUGCACCGUGGUCAGAGGG | 1682 | 13487 | CCCUCUGACCACGGUGCAA | 3434 |
| rs1803770 | 13470 | UGCACCGUGGUCAGAGGGA | 1683 | 13470 | UGCACCGUGGUCAGAGGGA | 1683 | 13488 | UCCCUCUGACCACGGUGCA | 3435 |
| rs1803770 | 13471 | GCACCGUGGUCAGAGGGAC | 1684 | 13471 | GCACCGUGGUCAGAGGGAC | 1684 | 13489 | GUCCCUCUGACCACGGUGC | 3436 |
| rs1803770 | 13472 | CACCGUGGUCAGAGGGACU | 1685 | 13472 | CACCGUGGUCAGAGGGACU | 1685 | 13490 | AGUCCCUCUGACCACGGUG | 3437 |
| rs1803770 | 13473 | ACCGUGGUCAGAGGGACUG | 1686 | 13473 | ACCGUGGUCAGAGGGACUG | 1686 | 13491 | CAGUCCCUCUGACCACGGU | 3438 |
| rs1803770 | 13474 | CCGUGGUCAGAGGGACUGU | 1687 | 13474 | CCGUGGUCAGAGGGACUGU | 1687 | 13492 | ACAGUCCCUCUGACCACGG | 3439 |
| rs1803770 | 13475 | CGUGGUCAGAGGGACUGUC | 1688 | 13475 | CGUGGUCAGAGGGACUGUC | 1688 | 13493 | GACAGUCCCUCUGACCACG | 3440 |
| rs1803770 | 13476 | GUGGUCAGAGGGACUGUCA | 1689 | 13476 | GUGGUCAGAGGGACUGUCA | 1689 | 13494 | UGACAGUCCCUCUGACCAC | 3441 |
| rs1803770 | 13477 | UGGUCAGAGGGACUGUCAG | 1690 | 13477 | UGGUCAGAGGGACUGUCAG | 1690 | 13495 | CUGACAGUCCCUCUGACCA | 3442 |
| rs1803770 | 13478 | GGUCAGAGGGACUGUCAGC | 1691 | 13478 | GGUCAGAGGGACUGUCAGC | 1691 | 13496 | GCUGACAGUCCCUCUGACC | 3443 |
| rs1803770 | 13479 | GUCAGAGGGACUGUCAGCU | 1692 | 13479 | GUCAGAGGGACUGUCAGCU | 1692 | 13497 | AGCUGACAGUCCCUCUGAC | 3444 |
| rs1803770 | 13480 | UCAGAGGGACUGUCAGCUG | 1693 | 13480 | UCAGAGGGACUGUCAGCUG | 1693 | 13498 | CAGCUGACAGUCCCUCUGA | 3445 |
| rs1803770 | 13481 | CAGAGGGACUGUCAGCUGA | 1694 | 13481 | CAGAGGGACUGUCAGCUGA | 1694 | 13499 | UCAGCUGACAGUCCCUCUG | 3446 |
| rs1803770 | 13482 | AGAGGGACUGUCAGCUGAG | 1695 | 13482 | AGAGGGACUGUCAGCUGAG | 1695 | 13500 | CUCAGCUGACAGUCCCUCU | 3447 |
| rs1803770 | 13464 | CUGCUUUGCACCGUGGUCG | 1696 | 13464 | CUGCUUUGCACCGUGGUCG | 1696 | 13482 | CGACCACGGUGCAAAGCAG | 3448 |
| rs1803770 | 13465 | UGCUUUGCACCGUGGUCGG | 1697 | 13465 | UGCUUUGCACCGUGGUCGG | 1697 | 13483 | CCGACCACGGUGCAAAGCA | 3449 |
| rs1803770 | 13466 | GCUUUGCACCGUGGUCGGA | 1698 | 13466 | GCUUUGCACCGUGGUCGGA | 1698 | 13484 | UCCGACCACGGUGCAAAGC | 3450 |
| rs1803770 | 13467 | CUUUGCACCGUGGUCGGAG | 1699 | 13467 | CUUUGCACCGUGGUCGGAG | 1699 | 13485 | CUCCGACCACGGUGCAAAG | 3451 |
| rs1803770 | 13468 | UUUGCACCGUGGUCGGAGG | 1700 | 13468 | UUUGCACCGUGGUCGGAGG | 1700 | 13486 | CCUCCGACCACGGUGCAAA | 3452 |
| rs1803770 | 13469 | UUGCACCGUGGUCGGAGGG | 1701 | 13469 | UUGCACCGUGGUCGGAGGG | 1701 | 13487 | CCCUCCGACCACGGUGCAA | 3453 |
| rs1803770 | 13470 | UGCACCGUGGUCGGAGGGA | 1702 | 13470 | UGCACCGUGGUCGGAGGGA | 1702 | 13488 | UCCCUCCGACCACGGUGCA | 3454 |
| rs1803770 | 13471 | GCACCGUGGUCGGAGGGAC | 1703 | 13471 | GCACCGUGGUCGGAGGGAC | 1703 | 13489 | GUCCCUCCGACCACGGUGC | 3455 |
| rs1803770 | 13472 | CACCGUGGUCGGAGGGACU | 1704 | 13472 | CACCGUGGUCGGAGGGACU | 1704 | 13490 | AGUCCCUCCGACCACGGUG | 3456 |
| rs1803770 | 13473 | ACCGUGGUCGGAGGGACUG | 1705 | 13473 | ACCGUGGUCGGAGGGACUG | 1705 | 13491 | CAGUCCCUCCGACCACGGU | 3457 |
| rs1803770 | 13474 | CCGUGGUCGGAGGGACUGU | 1706 | 13474 | CCGUGGUCGGAGGGACUGU | 1706 | 13492 | ACAGUCCCUCCGACCACGG | 3458 |
| rs1803770 | 13475 | CGUGGUCGGAGGGACUGUC | 1707 | 13475 | CGUGGUCGGAGGGACUGUC | 1707 | 13493 | GACAGUCCCUCCGACCACG | 3459 |
| rs1803770 | 13476 | GUGGUCGGAGGGACUGUCA | 1708 | 13476 | GUGGUCGGAGGGACUGUCA | 1708 | 13494 | UGACAGUCCCUCCGACCAC | 3460 |
| rs1803770 | 13477 | UGGUCGGAGGGACUGUCAG | 1709 | 13477 | UGGUCGGAGGGACUGUCAG | 1709 | 13495 | CUGACAGUCCCUCCGACCA | 3461 |
| rs1803770 | 13478 | GGUCGGAGGGACUGUCAGC | 1710 | 13478 | GGUCGGAGGGACUGUCAGC | 1710 | 13496 | GCUGACAGUCCCUCCGACC | 3462 |
| rs1803770 | 13479 | GUCGGAGGGACUGUCAGCU | 1711 | 13479 | GUCGGAGGGACUGUCAGCU | 1711 | 13497 | AGCUGACAGUCCCUCCGAC | 3463 |
| rs1803770 | 13480 | UCGGAGGGACUGUCAGCUG | 1712 | 13480 | UCGGAGGGACUGUCAGCUG | 1712 | 13498 | CAGCUGACAGUCCCUCCGA | 3464 |
| rs1803770 | 13481 | CGGAGGGACUGUCAGCUGA | 1713 | 13481 | CGGAGGGACUGUCAGCUGA | 1713 | 13499 | UCAGCUGACAGUCCCUCCG | 3465 |
| rs1803770 | 13482 | GGAGGGACUGUCAGCUGAG | 1714 | 13482 | GGAGGGACUGUCAGCUGAG | 1714 | 13500 | CUCAGCUGACAGUCCCUCC | 3466 |
| rs1803771 | 13545 | GGAGCCCCACCCAGACCUG | 1715 | 13545 | GGAGCCCCACCCAGACCUG | 1715 | 13563 | CAGGUCUGGGUGGGGCUCC | 3467 |
| rs1803771 | 13546 | GAGCCCCACCCAGACCUGA | 1716 | 13546 | GAGCCCCACCCAGACCUGA | 1716 | 13564 | UCAGGUCUGGGUGGGGCUC | 3468 |
| rs1803771 | 13547 | AGCCCCACCCAGACCUGAA | 1717 | 13547 | AGCCCCACCCAGACCUGAA | 1717 | 13565 | UUCAGGUCUGGGUGGGGCU | 3469 |
| rs1803771 | 13548 | GCCCCACCCAGACCUGAAU | 1718 | 13548 | GCCCCACCCAGACCUGAAU | 1718 | 13566 | AUUCAGGUCUGGGUGGGGC | 3470 |
| rs1803771 | 13549 | CCCCACCCAGACCUGAAUG | 1719 | 13549 | CCCCACCCAGACCUGAAUG | 1719 | 13567 | CAUUCAGGUCUGGGUGGGG | 3471 |
| rs1803771 | 13550 | CCCACCCAGACCUGAAUGC | 1720 | 13550 | CCCACCCAGACCUGAAUGC | 1720 | 13568 | GCAUUCAGGUCUGGGUGGG | 3472 |
| rs1803771 | 13551 | CCACCCAGACCUGAAUGCU | 1721 | 13551 | CCACCCAGACCUGAAUGCU | 1721 | 13569 | AGCAUUCAGGUCUGGGUGG | 3473 |
| rs1803771 | 13552 | CACCCAGACCUGAAUGCUU | 1722 | 13552 | CACCCAGACCUGAAUGCUU | 1722 | 13570 | AAGCAUUCAGGUCUGGGUG | 3474 |
| rs1803771 | 13553 | ACCCAGACCUGAAUGCUUC | 1723 | 13553 | ACCCAGACCUGAAUGCUUC | 1723 | 13571 | GAAGCAUUCAGGUCUGGGU | 3475 |
| rs1803771 | 13554 | CCCAGACCUGAAUGCUUCU | 1724 | 13554 | CCCAGACCUGAAUGCUUCU | 1724 | 13572 | AGAAGCAUUCAGGUCUGGG | 3476 |
| rs1803771 | 13555 | CCAGACCUGAAUGCUUCUG | 1725 | 13555 | CCAGACCUGAAUGCUUCUG | 1725 | 13573 | CAGAAGCAUUCAGGUCUGG | 3477 |
| rs1803771 | 13556 | CAGACCUGAAUGCUUCUGA | 1726 | 13556 | CAGACCUGAAUGCUUCUGA | 1726 | 13574 | UCAGAAGCAUUCAGGUCUG | 3478 |
| rs1803771 | 13557 | AGACCUGAAUGCUUCUGAG | 1727 | 13557 | AGACCUGAAUGCUUCUGAG | 1727 | 13575 | CUCAGAAGCAUUCAGGUCU | 3479 |
| rs1803771 | 13558 | GACCUGAAUGCUUCUGAGA | 1728 | 13558 | GACCUGAAUGCUUCUGAGA | 1728 | 13576 | UCUCAGAAGCAUUCAGGUC | 3480 |
| rs1803771 | 13559 | ACCUGAAUGCUUCUGAGAG | 1729 | 13559 | ACCUGAAUGCUUCUGAGAG | 1729 | 13577 | CUCUCAGAAGCAUUCAGGU | 3481 |
| rs1803771 | 13560 | CCUGAAUGCUUCUGAGAGC | 1730 | 13560 | CCUGAAUGCUUCUGAGAGC | 1730 | 13578 | GCUCUCAGAAGCAUUCAGG | 3482 |
| rs1803771 | 13561 | CUGAAUGCUUCUGAGAGCA | 1731 | 13561 | CUGAAUGCUUCUGAGAGCA | 1731 | 13579 | UGCUCUCAGAAGCAUUCAG | 3483 |
| rs1803771 | 13562 | UGAAUGCUUCUGAGAGCAA | 1732 | 13562 | UGAAUGCUUCUGAGAGCAA | 1732 | 13580 | UUGCUCUCAGAAGCAUUCA | 3484 |
| rs1803771 | 13563 | GAAUGCUUCUGAGAGCAAA | 1733 | 13563 | GAAUGCUUCUGAGAGCAAA | 1733 | 13581 | UUUGCUCUCAGAAGCAUUC | 3485 |
| rs1803771 | 13545 | GGAGCCCCACCCAGACCUA | 1734 | 13545 | GGAGCCCCACCCAGACCUA | 1734 | 13563 | UAGGUCUGGGUGGGGCUCC | 3486 |
| rs1803771 | 13546 | GAGCCCCACCCAGACCUAA | 1735 | 13546 | GAGCCCCACCCAGACCUAA | 1735 | 13564 | UUAGGUCUGGGUGGGGCUC | 3487 |
| rs1803771 | 13547 | AGCCCCACCCAGACCUAAA | 1736 | 13547 | AGCCCCACCCAGACCUAAA | 1736 | 13565 | UUUAGGUCUGGGUGGGGCU | 3488 |
| rs1803771 | 13548 | GCCCCACCCAGACCUAAAU | 1737 | 13548 | GCCCCACCCAGACCUAAAU | 1737 | 13566 | AUUUAGGUCUGGGUGGGGC | 3489 |
| rs1803771 | 13549 | CCCCACCCAGACCUAAAUG | 1738 | 13549 | CCCCACCCAGACCUAAAUG | 1738 | 13567 | CAUUUAGGUCUGGGUGGGG | 3490 |
| rs1803771 | 13550 | CCCACCCAGACCUAAAUGC | 1739 | 13550 | CCCACCCAGACCUAAAUGC | 1739 | 13568 | GCAUUUAGGUCUGGGUGGG | 3491 |
| rs1803771 | 13551 | CCACCCAGACCUAAAUGCU | 1740 | 13551 | CCACCCAGACCUAAAUGCU | 1740 | 13569 | AGCAUUUAGGUCUGGGUGG | 3492 |
| rs1803771 | 13552 | CACCCAGACCUAAAUGCUU | 1741 | 13552 | CACCCAGACCUAAAUGCUU | 1741 | 13570 | AAGCAUUUAGGUCUGGGUG | 3493 |
| rs1803771 | 13553 | ACCCAGACCUAAAUGCUUC | 1742 | 13553 | ACCCAGACCUAAAUGCUUC | 1742 | 13571 | GAAGCAUUUAGGUCUGGGU | 3494 |
| rs1803771 | 13554 | CCCAGACCUAAAUGCUUCU | 1743 | 13554 | CCCAGACCUAAAUGCUUCU | 1743 | 13572 | AGAAGCAUUUAGGUCUGGG | 3495 |
| rs1803771 | 13555 | CCAGACCUAAAUGCUUCUG | 1744 | 13555 | CCAGACCUAAAUGCUUCUG | 1744 | 13573 | CAGAAGCAUUUAGGUCUGG | 3496 |
| rs1803771 | 13556 | CAGACCUAAAUGCUUCUGA | 1745 | 13556 | CAGACCUAAAUGCUUCUGA | 1745 | 13574 | UCAGAAGCAUUUAGGUCUG | 3497 |
| rs1803771 | 13557 | AGACCUAAAUGCUUCUGAG | 1746 | 13557 | AGACCUAAAUGCUUCUGAG | 1746 | 13575 | CUCAGAAGCAUUUAGGUCU | 3498 |
| rs1803771 | 13558 | GACCUAAAUGCUUCUGAGA | 1747 | 13558 | GACCUAAAUGCUUCUGAGA | 1747 | 13576 | UCUCAGAAGCAUUUAGGUC | 3499 |
| rs1803771 | 13559 | ACCUAAAUGCUUCUGAGAG | 1748 | 13559 | ACCUAAAUGCUUCUGAGAG | 1748 | 13577 | CUCUCAGAAGCAUUUAGGU | 3500 |
| rs1803771 | 13560 | CCUAAAUGCUUCUGAGAGC | 1749 | 13560 | CCUAAAUGCUUCUGAGAGC | 1749 | 13578 | GCUCUCAGAAGCAUUUAGG | 3501 |
| rs1803771 | 13561 | CUAAAUGCUUCUGAGAGCA | 1750 | 13561 | CUAAAUGCUUCUGAGAGCA | 1750 | 13579 | UGCUCUCAGAAGCAUUUAG | 3502 |
| rs1803771 | 13562 | UAAAUGCUUCUGAGAGCAA | 1751 | 13562 | UAAAUGCUUCUGAGAGCAA | 1751 | 13580 | UUGCUCUCAGAAGCAUUUA | 3503 |
| rs1803771 | 13563 | AAAUGCUUCUGAGAGCAAA | 1752 | 13563 | AAAUGCUUCUGAGAGCAAA | 1752 | 13581 | UUUGCUCUCAGAAGCAUUU | 3504 |
| The 3′-ends of the Upper sequence and the Lower sequence of the siNA construct can include an overhang sequence, for example about 1, 2, 3, or 4 nucleotides in length, preferably 2 nucleotides in length, wherein the overhanging sequence of the lower sequence is optionally complementary to a portion of the target sequence. The overhang can comprise the general structure B, BNN, NN, BNsN, or NsN, where B stands for any terminal cap moiety, N stands for any nucleotide (e.g., thymidine) and s | | | | | | | | | |
| # stands for phosphorothioate or other internucleotide linkage as described herein (e.g. internucleotide linkage having Formula I). The upper sequence is also referred to as the sense strand, whereas the lower sequence is also referred to as the antisense strand. The upper and lower sequences in the Table can further comprise a chemical modification having Formulae I-VII or any combination thereof (see for example chemical modifications as shown in Table V herein). | | | | | | | | | |

[0538] TABLE III

HD synthetic siNA and Target Sequences

Tar-

| | | | |
|---|---|---|---|
| get | Seq | Sirna | SEQ |

| | | | | | | |
|---|---|---|---|---|---|---|
| Pos | Target | ID | # | Aliases | Sequence | ID |

| | | | | | | |
|---|---|---|---|---|---|---|
| 586 | CAAAGAAAGAACUUUCAGCUACC | 3505 | 31993 | HD:586U21 sense | AAGAAAGAACUUUCAGCUATT | 3512 |
| 586 | CAAAGAAAGAACUUUCAGCUACC | 3505 | 31994 | HD:604L21 (586C) antisense | UAGCUGAAAGUUCUUUCUUTT | 3513 |
| 586 | CAAAGAAAGAACUUUCAGCUACC | 3505 | 31995 | HD:586U21 stab04 sense | B AAGAAAGAAcuuucAGcuATT B | 3514 |
| 586 | CAAAGAAAGAACUUUCAGCUACC | 3505 | 31996 | HD:604L21 (586C) stab05 | uAGcuGAAAGuucuuucuuTsT | 3515 |
| | | | | antisense | | |
| 586 | CAAAGAAAGAACUUUCAGCUACC | 3505 | 31997 | HD:586U21 stab07 sense | B AAGAAAGAAcuuucAGcuATT B | 3516 |
| 586 | CAAAGAAAGAACUUUCAGCUACC | 3505 | 31998 | HD:604L21 (586C) stab08 | uAGcuGAAAGuucuuucuuTsT | 3517 |
| | | | | antisense | | |
| 586 | CAAAGAAAGAACUUUCAGCUACC | 3505 | 31999 | HD:586U21 inv sense | AUCGACUUUCAAGAAAGAATT | 3518 |
| 586 | CAAAGAAAGAACUUUCAGCUACC | 3505 | 32000 | HD:604L21 (586C) inv antisense | UUCUUUCUUGAAAGUCGAUTT | 3519 |
| 586 | CAAAGAAAGAACUUUCAGCUACC | 3505 | 32001 | HD:586U21 inv stab04 sense | B AucGAcuuucAAGAAAGAATT B | 3520 |
| 586 | CAAAGAAAGAACUUUCAGCUACC | 3505 | 32002 | HD:604L21 (586C) inv stab05 | uucuuucuuGAAAGucGAuTsT | 3521 |
| | | | | antisense | | |
| 586 | CAAAGAAAGAACUUUCAGCUACC | 3505 | 32003 | HD:586U21 inv stab07 sense | B AucGAcuuucAAGAAAGAATT B | 3522 |
| 586 | CAAAGAAAGAACUUUCAGCUACC | 3505 | 32004 | HD:604L21 (586C) inv stab08 | uucuuucuuGAAAGucGAuTsT | 3523 |
| | | | | antisense | | |
| 316 | CCAUGGCGACCCUGGAAAAGCUG | 3506 | 33065 | HD:316U21 siRNA stab04 sense | B AuGGcGAcccuGGAAAAGcTT B | 3524 |
| 591 | AAAGAACUUUCAGCUACCAAGAA | 3507 | 33066 | HD:591U21 siRNA stab04 sense | B AGAAcuuucAGcuAccAAGTT B | 3525 |
| 671 | AAAUUCUCCAGAAUUUCAGAAAC | 3508 | 33067 | HD:671U21 siRNA stab04 sense | B AuucuccAGAAuuucAGAATT B | 3526 |
| 769 | AAUGCCUCAACAAAGUUAUCAAA | 3509 | 33068 | HD:769U21 siRNA stab04 sense | B uGccucAAcAAAGuuAucATT B | 3527 |
| 1 | GAGGAAGAGGAGGAGGCCGAC | 3510 | 33069 | HD-Ex58:3U21 siRNA stab04 | B GGAAGAGGAGGAGGccGAcTT B | 3528 |
| | | | | sense | | |
| 2 | AAGAGGAGGAGGCCGACGCCC | 3511 | 33070 | HD-Ex58:7U21 siRNA stab04 | B GAGGAGGAGGccGAcGcccTT B | 3529 |
| | | | | sense | | |
| 316 | CCAUGGCGACCCUGGAAAAGCUG | 3506 | 33071 | HD:334L21 siRNA (316C) stab05 | GcuuuuccAGGGucGccAuTsT | 3530 |
| | | | | antisense | | |
| 591 | AAAGAACUUUCAGCUACCAAGAA | 3507 | 33072 | HD:609L21 siRNA (591C) stab05 | cuuGGuAGcuGAAAGuucuTsT | 3531 |
| | | | | antisense | | |
| 671 | AAAUUCUCCAGAAUUUCAGAAAC | 3508 | 33073 | HD:689L21 siRNA (671C) stab05 | uucuGAAAuucuGGAGAAuTsT | 3532 |
| | | | | antisense | | |
| 769 | AAUGCCUCAACAAAGUUAUCAAA | 3509 | 33074 | HD:787L21 siRNA (769C) stab05 | uGAuAAcuuuGuuGAGGcATsT | 3533 |
| | | | | antisense | | |
| 1 | GAGGAAGAGGAGGAGGCCGAC | 3510 | 33075 | HD-Ex58:21L21 siRNA (Ex58-3C) | GucGGccuccuccucuuccTsT | 3534 |
| | | | | stab05 antisense | | |
| 2 | AAGAGGAGGAGGCCGACGCCC | 3511 | 33076 | HD-Ex58:25L21 siRNA (Ex58-7C) | GGGcGucGGccuccuccucTsT | 3535 |
| | | | | stab05 antisense | | |
| 316 | CCAUGGCGACCCUGGAAAAGCUG | 3506 | 33077 | HD:316U21 siRNA stab07 sense | B AuGGcGAcccuGGAAAAGcTT B | 3536 |
| 591 | AAAGAACUUUCAGCUACCAAGAA | 3507 | 33078 | HD:591U21 siRNA stab07 sense | B AGAAcuuucAGcuAccAAGTT B | 3537 |
| 671 | AAAUUCUCCAGAAUUUCAGAAAC | 3508 | 33079 | HD:671U21 siRNA stab07 sense | B AuucuccAGAAuuucAGAATT B | 3538 |
| 769 | AAUGCCUCAACAAAGUUAUCAAA | 3509 | 33080 | HD:769U21 siRNA stab07 sense | B uGccucAAcAAAGuuAucATT B | 3539 |
| 1 | GAGGAAGAGGAGGAGGCCGAC | 3510 | 33081 | HD-Ex58:3U21 siRNA stab07 | B GGAAGAGGAGGAGGccGAcTT B | 3540 |
| | | | | sense | | |
| 2 | AAGAGGAGGAGGCCGACGCCC | 3511 | 33082 | HD-Ex58:7U21 siRNA stab07 | B GAGGAGGAGGccGAcGcccTT B | 3541 |
| | | | | sense | | |
| 316 | CCAUGGCGACCCUGGAAAAGCUG | 3506 | 33083 | HD:334L21 siRNA (316C) stab08 | GcuuuuccAGGGucGccAuTsT | 3542 |
| | | | | antisense | | |
| 591 | AAAGAACUUUCAGCUACCAAGAA | 3507 | 33084 | HD:609L21 siRNA (591C) stab08 | cuuGGuAGcuGAAAGuucuTsT | 3543 |
| | | | | antisense | | |
| 671 | AAAUUCUCCAGAAUUUCAGAAAC | 3508 | 33085 | HD:689L21 siRNA (671C) stab08 | uucuGAAAuucuGGAGAAuTsT | 3544 |
| | | | | antisense | | |
| 769 | AAUGCCUCAACAAAGUUAUCAAA | 3509 | 33086 | HD:787L21 siRNA (769C) stab08 | uGAuAAcuuuGuuGAGGcATsT | 3545 |
| | | | | antisense | | |
| 1 | GAGGAAGAGGAGGAGGCCGAC | 3510 | 33087 | HD-Ex58:21L21 siRNA (Ex58-3C) | GucGGccuccuccucuuccTsT | 3546 |
| | | | | stab08 antisense | | |
| 2 | AAGAGGAGGAGGCCGACGCCC | 3511 | 33088 | HD-Ex58:25L21 siRNA (Ex58-7C) | GGGcGucGGccuccuccucTsT | 3547 |
| | | | | stab08 antisense | | |
| 316 | CCAUGGCGACCCUGGAAAAGCUG | 3506 | 33089 | HD:316U21 siRNA stab09 | B AUGGCGACCCUGGAAAAGCTT B | 3548 |
| | | | | sense | | |
| 591 | AAAGAACUUUCAGCUACCAAGAA | 3507 | 33090 | HD:591U21 siRNA stab09 | B AGAACUUUCAGCUACCAAGTT B | 3549 |
| | | | | sense | | |
| 671 | AAAUUCUCCAGAAUUUCAGAAAC | 3508 | 33091 | HD:671U21 siRNA stab09 | B AUUCUCCAGAAUUUCAGAATT B | 3550 |
| | | | | sense | | |
| 769 | AAUGCCUCAACAAAGUUAUCAAA | 3509 | 33092 | HD:769U21 siRNA stab09 | B UGCCUCAACAAAGUUAUCATT B | 3551 |
| | | | | sense | | |
| 1 | GAGGAAGAGGAGGAGGCCGAC | 3510 | 33093 | HD-Ex58:3U21 siRNA stab09 | B GGAAGAGGAGGAGGCCGACTT B | 3552 |
| | | | | sense | | |
| 2 | AAGAGGAGGAGGCCGACGCCC | 3511 | 33094 | HD-Ex58:7U21 siRNA stab09 | B GAGGAGGAGGCCGACGCCCTT B | 3553 |
| | | | | sense | | |
| 316 | CCAUGGCGACCCUGGAAAAGCUG | 3506 | 33095 | HD:334L21 siRNA (316C) stab10 | GCUUUUCCAGGGUCGCCAUTsT | 3554 |
| | | | | antisense | | |
| 591 | AAAGAACUUUCAGCUACCAAGAA | 3507 | 33096 | HD:609L21 siRNA (591C) stab10 | CUUGGUAGCUGAAAGUUCUTsT | 3555 |
| | | | | antisense | | |
| 671 | AAAUUCUCCAGAAUUUCAGAAAC | 3508 | 33097 | HD:689L21 siRNA (671C) stab10 | UUCUGAAAUUCUGGAGAAUTsT | 3556 |
| | | | | antisense | | |
| 769 | AAUGCCUCAACAAAGUUAUCAAA | 3509 | 33098 | HD:787L21 siRNA (769C) stab10 | UGAUAACUUUGUUGAGGCATsT | 3557 |
| | | | | antisense | | |
| 1 | GAGGAAGAGGAGGAGGCCGAC | 3510 | 33099 | HD-Ex58:21L21 siRNA (Ex58-3C) | GUCGGCCUCCUCCUCUUCCTsT | 3558 |
| | | | | stab10 antisense | | |
| 2 | AAGAGGAGGAGGCCGACGCCC | 3511 | 33100 | HD-Ex58:25L21 siRNA (Ex58-7C) | GGGCGUCGGCCUCCUCCUCTsT | 3559 |
| | | | | stab10 antisense | | |

Uppercase = ribonucleotide
u,c = 2′-deoxy-2′-fluoro U,C
T = thymidine
B = inverted deoxy abasic
s = phosphorothioate linkage
A = deoxy Adenosine
G = deoxy Guanosine
G = 2′-O-methyl Guanosine
X = nitroindole universal base
Z = nitropyrole universal base
Y = 3′, 3′-inverted thymidine
M = glyceryl
N = 3′-O-methyl uridine
P = L-thymidine
R = 5-bromo-deoxy-uridine
Z = sbL: symmetrical bifunctional linker
H = chol2: capped Cholesterol TEG
A = 2′-O-methyl Adenosine
Q = L-uridine

[0539] TABLE IV
Non-limiting examples of Stabilization Chemistries for chemically modified
siNA constructs

| Chemistry | pyrimidine | Purine | cap | p = S | Strand |
|---|---|---|---|---|---|
| “Stab 00” | Ribo | Ribo | TT at 3′- ends | | S/AS |
| “Stab 1” | Ribo | Ribo | — | 5 at 5′-end | S/AS |
| | | | | 1 at 3′-end | |
| “Stab 2” | Ribo | Ribo | — | All linkages | Usually AS |
| “Stab 3” | 2′-fluoro | Ribo | — | 4 at 5′-end | Usually S |
| | | | | 4 at 3′-end | |
| “Stab 4” | 2′-fluoro | Ribo | 5′ and 3′- ends | — | Usually S |
| “Stab 5” | 2′-fluoro | Ribo | — | 1 at 3′-end | Usually AS |
| “Stab 6” | 2′-O-Methyl | Ribo | 5′ and 3′- | — | Usually S |
| | | | ends | | |
| “Stab 7” | 2′-fluoro | 2′-deoxy | 5′ and 3′- | — | Usually S |
| | | | ends | | |
| “Stab 8” | 2′-fluoro | 2′-O- Methyl | — | 1 at 3′-end | S/AS |
| “Stab 9” | Ribo | Ribo | 5′ and 3′- | — | Usually S |
| | | | ends | | |
| “Stab 10” | Ribo | Ribo | — | 1 at 3′-end | Usually AS |
| “Stab 11” | 2′-fluoro | 2′-deoxy | — | 1 at 3′-end | Usually AS |
| “Stab 12” | 2′-fluoro | LNA | 5′ and 3′- | | Usually S |
| | | | ends | | |
| “Stab 13” | 2′-fluoro | LNA | | 1 at 3′-end | Usually AS |
| “Stab 14” | 2′-fluoro | 2′-deoxy | | 2 at 5′-end | Usually AS |
| | | | | 1 at 3′-end | |
| “Stab 15” | 2′-deoxy | 2′-deoxy | | 2 at 5′-end | Usually AS |
| | | | | 1 at 3′-end | |
| “Stab 16” | Ribo | 2′-O- | 5′ and 3′- | | Usually S |
| | | Methyl | ends | | |
| “Stab 17” | 2′-O-Methyl | 2′-O- | 5′ and 3′- | | Usually S |
| | | Methyl | ends | | |
| “Stab 18” | 2′-fluoro | 2′-O- | 5′ and 3′- | | Usually S |
| | | Methyl | ends | | |
| “Stab 19” | 2′-fluoro | 2′-O- | 3′-end | | S/AS |
| | | Methyl | | | |
| “Stab 20” | 2′-fluoro | 2′-deoxy | 3′-end | | Usually AS |
| “Stab 21” | 2′-fluoro | Ribo | 3′-end | | Usually AS |
| “Stab 22” | Ribo | Ribo | 3′-end | | Usually AS |
| “Stab 23” | 2′-fluoro* | 2′-deoxy* | 5′ and 3′- | | Usually S |
| | | | ends | | |
| “Stab 24” | 2′-fluoro* | 2′-O- | — | 1 at 3′-end | S/AS |
| | | Methyl* | | | |
| “Stab 25” | 2′-fluoro* | 2′-O- | — | 1 at 3′-end | S/AS |
| | | Methyl* | | | |
| “Stab 26” | 2′-fluoro* | 2′-O- | — | | S/AS |
| | | Methyl* | | | |
| “Stab 27” | 2′-fluoro* | 2′-O- | 3′-end | | S/AS |
| | | Methyl* | | | |
| “Stab 28” | 2′-fluoro* | 2′-O- | 3′-end | | S/AS |
| | | Methyl* | | | |
| “Stab 29” | 2′-fluoro* | 2′-O- | | 1 at 3′-end | S/AS |
| | | Methyl* | | | |
| “Stab 30” | 2′-fluoro* | 2′-O- | | | S/AS |
| | | Methyl* | | | |
| “Stab 31” | 2′-fluoro* | 2′-O- | 3′-end | | S/AS |
| | | Methyl* | | | |
| “Stab 32” | 2′-fluoro | 2′-O- | | | S/AS |
| | | Methyl | | | |
| “Stab 33” | 2′-fluoro | 2′-deoxy* | 5′ and 3′- | — | Usually S |
| | | | ends | | |
| “Stab 34” | 2′-fluoro | 2′-O- | 5′ and 3′- | | Usually S |
| | | Methyl* | ends | | |
| “Stab 3F” | 2′-OCF3 | Ribo | — | 4 at 5′-end | Usually S |
| | | | | 4 at 3′-end | |
| “Stab 4F” | 2′-OCF3 | Ribo | 5′ and 3′- | — | Usually S |
| | | | ends | | |
| “Stab 5F” | 2′-OCF3 | Ribo | — | 1 at 3′-end | Usually AS |
| “Stab 7F” | 2′-OCF3 | 2′-deoxy | 5′ and 3′- | — | Usually S |
| | | | ends | | |
| “Stab 8F” | 2′-OCF3 | 2′-O- | — | 1 at 3′-end | S/AS |
| | | Methyl | | | |
| “Stab 11F” | 2′-OCF3 | 2′-deoxy | — | 1 at 3′-end | Usually AS |
| “Stab 12F” | 2′-OCF3 | LNA | 5′ and 3′- | | Usually S |
| | | | ends | | |
| “Stab 13F” | 2′-OCF3 | LNA | | 1 at 3′-end | Usually AS |
| “Stab 14F” | 2′-OCF3 | 2′-deoxy | | 2 at 5′-end | Usually AS |
| | | | | 1 at 3′-end | |
| “Stab 15F” | 2′-OCF3 | 2′-deoxy | | 2 at 5′-end | Usually AS |
| | | | | 1 at 3′-end | |
| “Stab 18F” | 2′-OCF3 | 2′-O- | 5′ and 3′- | | Usually S |
| | | Methyl | ends | | |
| “Stab 19F” | 2′-OCF3 | 2′-O- | 3′-end | | S/AS |
| | | Methyl | | | |
| “Stab 20F” | 2′-OCF3 | 2′-deoxy | 3′-end | | Usually AS |
| “Stab 21F” | 2′-OCF3 | Ribo | 3′-end | | Usually AS |
| “Stab 23F” | 2′-OCF3* | 2′-deoxy* | 5′ and 3′- | | Usually S |
| | | | ends | | |
| “Stab 24F” | 2′-OCF3* | 2′-O- | — | 1 at 3′-end | S/AS |
| | | Methyl* | | | |
| “Stab 25F” | 2′-OCF3* | 2′-O- | — | 1 at 3′-end | S/AS |
| | | Methyl* | | | |
| “Stab 26F” | 2′-OCF3* | 2′-O- | — | | S/AS |
| | | Methyl* | | | |
| “Stab 27F” | 2′-OCF3* | 2′-O- | 3′-end | | S/AS |
| | | Methyl* | | | |
| “Stab 28F” | 2′-OCF3* | 2′-O- | 3′-end | | S/AS |
| | | Methyl* | | | |
| “Stab 29F” | 2′-OCF3* | 2′-O- | | 1 at 3′-end | S/AS |
| | | Methyl* | | | |
| “Stab 30F” | 2′-OCF3* | 2′-O- | | | S/AS |
| | | Methyl* | | | |
| “Stab 31F” | 2′-OCF3* | 2′-O- | 3′-end | | S/AS |
| | | Methyl* | | | |
| “Stab 32F” | 2′-OCF3 | 2′-O- | | | S/AS |
| | | Methyl | | | |
| “Stab 33F” | 2′-OCF3 | 2′-deoxy* | 5′ and 3′- | — | Usually S |
| | | | ends | | |
| “Stab 34F” | 2′-OCF3 | 2′-O- | 5′ and 3′- | | Usually S |
| | | Methyl* | ends | | |

CAP = any terminal cap, see for example FIG. 10.
All Stab 00-34 chemistries can comprise 3′-terminal thymidine (TT) residues
All Stab 00-34 chemistries typically comprise about 21 nucleotides, but can vary as described herein.
S = sense strand
AS = antisense strand
*Stab 23 has a single ribonucleotide adjacent to 3′-CAP
*Stab 24 and Stab 28 have a single ribonucleotide at 5′-terminus
*Stab 25, Stab 26, and Stab 27 have three ribonucleotides at 5′-terminus
*Stab 29, Stab 30, Stab 31, Stab 33, and Stab 34 any purine at first three nucleotide positions from 5′-terminus are ribonucleotides
p = phosphorothioate linkage

[0540] TABLE V
A. 2.5 μmol Synthesis Cycle ABI 394 Instrument

| Reagent | Equivalents | Amount | | Wait Time* DNA | | Wait Time* 2′-O-methyl | | Wait Time*RNA | |
|---|---|---|---|---|---|---|---|---|---|
| Phosphoramidites | 6.5 | 163 | μL | 45 | sec | 2.5 | min | 7.5 | min |
| S-Ethyl Tetrazole | 23.8 | 238 | μL | 45 | sec | 2.5 | min | 7.5 | min |
| Acetic Anhydride | 100 | 233 | μL | 5 | sec | 5 | sec | 5 | sec |
| N-Methyl | 186 | 233 | μL | 5 | sec | 5 | sec | 5 | sec |
| Imidazole | | | | | | | | | |
| TCA | 176 | 2.3 | mL | 21 | sec | 21 | sec | 21 | sec |
| Iodine | 11.2 | 1.7 | mL | 45 | sec | 45 | sec | 45 | sec |
| Beaucage | 12.9 | 645 | μL | 100 | sec | 300 | sec | 300 | sec |

| | | | | | | |
|---|---|---|---|---|---|---|
| Acetonitrile | NA | 6.67 | mL | NA | NA | NA |

B. 0.2 μmol Synthesis Cycle ABI 394 Instrument

| Reagent | Equivalents | Amount | | Wait Time* DNA | | Wait Time* 2′-O-methyl | | Wait Time*RNA | |
|---|---|---|---|---|---|---|---|---|---|
| Phosphoramidites | 15 | 31 | μL | 45 | sec | 233 | sec | 465 | sec |
| S-Ethyl Tetrazole | 38.7 | 31 | μL | 45 | sec | 233 | min | 465 | sec |
| Acetic Anhydride | 655 | 124 | μL | 5 | sec | 5 | sec | 5 | sec |
| N-Methyl | 1245 | 124 | μL | 5 | sec | 5 | sec | 5 | sec |
| Imidazole | | | | | | | | | |
| TCA | 700 | 732 | μL | 10 | sec | 10 | sec | 10 | sec |
| Iodine | 20.6 | 244 | μL | 15 | sec | 15 | sec | 15 | sec |
| Beaucage | 7.7 | 232 | μL | 100 | sec | 300 | sec | 300 | sec |

| | | | | | | |
|---|---|---|---|---|---|---|
| Acetonitrile | NA | 2.64 | mL | NA | NA | NA |

C. 0.2 μmol Synthesis Cycle 96 well Instrument

| | Equivalents: DNA/ | Amount: DNA/2′-O- | | | | Wait Time* | | Wait Time* | |
|---|---|---|---|---|---|---|---|---|---|
| Reagent | 2′-O-methyl/Ribo | methyl/Ribo | | Wait Time* DNA | | 2′-O-methyl | | Ribo | |
| Phosphoramidites | 22/33/66 | 40/60/120 | μL | 60 | sec | 180 | sec | 360 | sec |
| S-Ethyl Tetrazole | 70/105/210 | 40/60/120 | μL | 60 | sec | 180 | min | 360 | sec |
| Acetic Anhydride | 265/265/265 | 50/50/50 | μL | 10 | sec | 10 | sec | 10 | sec |
| N-Methyl | 502/502/502 | 50/50/50 | μL | 10 | sec | 10 | sec | 10 | sec |
| Imidazole | | | | | | | | | |
| TCA | 238/475/475 | 250/500/500 | μL | 15 | sec | 15 | sec | 15 | sec |
| Iodine | 6.8/6.8/6.8 | 80/80/80 | μL | 30 | sec | 30 | sec | 30 | sec |
| Beaucage | 34/51/51 | 80/120/120 | | 100 | sec | 200 | sec | 200 | sec |

| | | | | | | |
|---|---|---|---|---|---|---|
| Acetonitrile | NA | 1150/1150/1150 | μL | NA | NA | NA |

*Wait time does not include contact time during delivery.
*Tandem synthesis utilizes double coupling of linker molecule

1. A chemically synthesized double stranded short interfering nucleic acid (siNA) molecule that directs cleavage of a huntingtin (HD) RNA via RNA interference, wherein:
a. each strand of said RNA molecule is about 19 to about 23 nucleotides in length;
b. one strand of said RNA molecule comprises nucleotide sequence having sufficient complementarity to said HD RNA for the RNA molecule to direct cleavage of the HD RNA via RNA interference; and
c. at least one strand of said RNA molecule comprises one or more chemically modified nucleotides.

2. The siNA molecule of claim 1, wherein said siNA molecule comprises no ribonucleotides.

3. The siNA molecule of claim 1, wherein said siNA molecule comprises ribonucleotides.

4. The siNA molecule of claim 1, wherein one of the strands of said double-stranded siNA molecule comprises a nucleotide sequence that is complementary to a nucleotide sequence of a huntingtin (HD) gene or a portion thereof, and wherein the second strand of said double-stranded siNA molecule comprises a nucleotide sequence substantially similar to the nucleotide sequence or a portion thereof of said huntingtin (HD) gene.

5. The siNA molecule of claim 4, wherein each strand of the siNA molecule comprises about 19 to about 23 nucleotides, and wherein each strand comprises at least about 19 nucleotides that are complementary to the nucleotides of the other strand.

6. The siNA molecule of claim 1, wherein said siNA molecule comprises an antisense region comprising a nucleotide sequence that is complementary to a nucleotide sequence of a huntingtin (HD) gene or a portion thereof, and wherein said siNA further comprises a sense region, wherein said sense region comprises a nucleotide sequence substantially similar to the nucleotide sequence of said huntingtin (HD) gene or a portion thereof.

7. The siNA molecule of claim 6, wherein said antisense region and said sense region each comprise about 19 to about 23 nucleotides, and wherein said antisense region comprises at least about 19 nucleotides that are complementary to nucleotides of the sense region.

8. The siNA molecule of claim 1, wherein said siNA molecule comprises a sense region and an antisense region, and wherein said antisense region comprises a nucleotide sequence that is complementary to a nucleotide sequence of RNA encoded by a huntingtin (HD) gene, or a portion thereof, and said sense region comprises a nucleotide sequence that is complementary to said antisense region.

9. The siNA molecule of claim 6, wherein said siNA molecule is assembled from two separate oligonucleotide fragments wherein one fragment comprises the sense region and the second fragment comprises the antisense region of said siNA molecule.

10. The siNA molecule of claim claim 6, wherein said sense region is connected to the antisense region via a linker molecule.

11. The siNA molecule of claim 10, wherein said linker molecule is a polynucleotide linker.

12. The siNA molecule of claim 10, wherein said linker molecule is a non-nucleotide linker.

13. The siNA molecule of claim 6, wherein pyrimidine nucleotides in the sense region are 2′-O-methylpyrimidine nucleotides.

14. The siNA molecule of claim 6, wherein purine nucleotides in the sense region are 2′-deoxy purine nucleotides.

15. The siNA molecule of claim 6, wherein the pyrimidine nucleotides present in the sense region are 2′-deoxy-2′-fluoro pyrimidine nucleotides.

16. The siNA molecule of claim 9, wherein the fragment comprising said sense region includes a terminal cap moiety at the 5′-end, the 3′-end, or both of the 5′ and 3′ ends of the fragment comprising said sense region.

17. The siNA molecule of claim 16, wherein said terminal cap moiety is an inverted deoxy abasic moiety.

18. The siNA molecule of claim 6, wherein the pyrimidine nucleotides of said antisense region are 2′-deoxy-2′-fluoro pyrimidine nucleotides

19. The siNA molecule of claim 6, wherein the purine nucleotides of said antisense region are 2′-O-methyl purine nucleotides.

20. The siNA molecule of claim 6, wherein the purine nucleotides present in said antisense region comprise 2′-deoxy-purine nucleotides.

21. The siNA molecule of claim 18, wherein said antisense region comprises a phosphorothioate internucleotide linkage at the 3′ end of said antisense region.

22. The siNA molecule of claim 6, wherein said antisense region comprises a glyceryl modification at the 3′ end of said antisense region.

23. The siNA molecule of claim 9, wherein each of the two fragments of said siNA molecule comprise 21 nucleotides.

24. The siNA molecule of claim 23, wherein about 19 nucleotides of each fragment of the siNA molecule are base-paired to the complementary nucleotides of the other fragment of the siNA molecule and wherein at least two 3′ terminal nucleotides of each fragment of the siNA molecule are not base-paired to the nucleotides of the other fragment of the siNA molecule.

25. The siNA molecule of claim 24, wherein each of the two 3′ terminal nucleotides of each fragment of the siNA molecule are 2′-deoxy-pyrimidines.

26. The siNA molecule of claim 25, wherein said 2′-deoxy-pyrimidine is 2′-deoxy-thymidine.

27. The siNA molecule of claim 23, wherein all 21 nucleotides of each fragment of the siNA molecule are base-paired to the complementary nucleotides of the other fragment of the siNA molecule.

28. The siNA molecule of claim 23, wherein about 19 nucleotides of the antisense region are base-paired to the nucleotide sequence of the RNA encoded by a huntingtin (HD) gene or a portion thereof.

29. The siNA molecule of claim 23, wherein 21 nucleotides of the antisense region are base-paired to the nucleotide sequence of the RNA encoded by a huntingtin (HD) gene or a portion thereof.

30. The siNA molecule of claim 9, wherein the 5′-end of the fragment comprising said antisense region optionally includes a phosphate group.

31. A pharmaceutical composition comprising the siNA molecule of claim 1 in an acceptable carrier or diluent.

The application's sequence listing, which the Patent Office published only in electronic form, follows.

SEQUENCE LISTING (3579 sequences)

SEQ ID NO: 1 - RNA, 19 nt, Artificial Sequence
  Synthetic
caaucaugcuggccggcgu

SEQ ID NO: 2 - RNA, 19 nt, Artificial Sequence
  Synthetic
aaucaugcuggccggcgug

SEQ ID NO: 3 - RNA, 19 nt, Artificial Sequence
  Synthetic
aucaugcuggccggcgugg

SEQ ID NO: 4 - RNA, 19 nt, Artificial Sequence
  Synthetic
ucaugcuggccggcguggc

SEQ ID NO: 5 - RNA, 19 nt, Artificial Sequence
  Synthetic
caugcuggccggcguggcc

SEQ ID NO: 6 - RNA, 19 nt, Artificial Sequence
  Synthetic
augcuggccggcguggccc

SEQ ID NO: 7 - RNA, 19 nt, Artificial Sequence
  Synthetic
ugcuggccggcguggcccc

SEQ ID NO: 8 - RNA, 19 nt, Artificial Sequence
  Synthetic
gcuggccggcguggccccg

SEQ ID NO: 9 - RNA, 19 nt, Artificial Sequence
  Synthetic
cuggccggcguggccccgc

SEQ ID NO: 10 - RNA, 19 nt, Artificial Sequence
  Synthetic
uggccggcguggccccgcc

SEQ ID NO: 11 - RNA, 19 nt, Artificial Sequence
  Synthetic
ggccggcguggccccgccu

SEQ ID NO: 12 - RNA, 19 nt, Artificial Sequence
  Synthetic
gccggcguggccccgccuc

SEQ ID NO: 13 - RNA, 19 nt, Artificial Sequence
  Synthetic
ccggcguggccccgccucc

SEQ ID NO: 14 - RNA, 19 nt, Artificial Sequence
  Synthetic
cggcguggccccgccuccg

SEQ ID NO: 15 - RNA, 19 nt, Artificial Sequence
  Synthetic
ggcguggccccgccuccgc

SEQ ID NO: 16 - RNA, 19 nt, Artificial Sequence
  Synthetic
gcguggccccgccuccgcc

SEQ ID NO: 17 - RNA, 19 nt, Artificial Sequence
  Synthetic
cguggccccgccuccgccg

SEQ ID NO: 18 - RNA, 19 nt, Artificial Sequence
  Synthetic
guggccccgccuccgccgg

SEQ ID NO: 19 - RNA, 19 nt, Artificial Sequence
  Synthetic
uggccccgccuccgccggc

SEQ ID NO: 20 - RNA, 19 nt, Artificial Sequence
  Synthetic
caaucaugcuggccggcgc

SEQ ID NO: 21 - RNA, 19 nt, Artificial Sequence
  Synthetic
aaucaugcuggccggcgcg

SEQ ID NO: 22 - RNA, 19 nt, Artificial Sequence
  Synthetic
aucaugcuggccggcgcgg

SEQ ID NO: 23 - RNA, 19 nt, Artificial Sequence
  Synthetic
ucaugcuggccggcgcggc

SEQ ID NO: 24 - RNA, 19 nt, Artificial Sequence
  Synthetic
caugcuggccggcgcggcc

SEQ ID NO: 25 - RNA, 19 nt, Artificial Sequence
  Synthetic
augcuggccggcgcggccc

SEQ ID NO: 26 - RNA, 19 nt, Artificial Sequence
  Synthetic
ugcuggccggcgcggcccc

SEQ ID NO: 27 - RNA, 19 nt, Artificial Sequence
  Synthetic
gcuggccggcgcggccccg

SEQ ID NO: 28 - RNA, 19 nt, Artificial Sequence
  Synthetic
cuggccggcgcggccccgc

SEQ ID NO: 29 - RNA, 19 nt, Artificial Sequence
  Synthetic
uggccggcgcggccccgcc

SEQ ID NO: 30 - RNA, 19 nt, Artificial Sequence
  Synthetic
ggccggcgcggccccgccu

SEQ ID NO: 31 - RNA, 19 nt, Artificial Sequence
  Synthetic
gccggcgcggccccgccuc

SEQ ID NO: 32 - RNA, 19 nt, Artificial Sequence
  Synthetic
ccggcgcggccccgccucc

SEQ ID NO: 33 - RNA, 19 nt, Artificial Sequence
  Synthetic
cggcgcggccccgccuccg

SEQ ID NO: 34 - RNA, 19 nt, Artificial Sequence
  Synthetic
ggcgcggccccgccuccgc

SEQ ID NO: 35 - RNA, 19 nt, Artificial Sequence
  Synthetic
gcgcggccccgccuccgcc

SEQ ID NO: 36 - RNA, 19 nt, Artificial Sequence
  Synthetic
cgcggccccgccuccgccg

SEQ ID NO: 37 - RNA, 19 nt, Artificial Sequence
  Synthetic
gcggccccgccuccgccgg

SEQ ID NO: 38 - RNA, 19 nt, Artificial Sequence
  Synthetic
cggccccgccuccgccggc

SEQ ID NO: 39 - RNA, 19 nt, Artificial Sequence
  Synthetic
gaaaagcugaugaaggccu

SEQ ID NO: 40 - RNA, 19 nt, Artificial Sequence
  Synthetic
aaaagcugaugaaggccuu

SEQ ID NO: 41 - RNA, 19 nt, Artificial Sequence
  Synthetic
aaagcugaugaaggccuuc

SEQ ID NO: 42 - RNA, 19 nt, Artificial Sequence
  Synthetic
aagcugaugaaggccuucg

SEQ ID NO: 43 - RNA, 19 nt, Artificial Sequence
  Synthetic
agcugaugaaggccuucga

SEQ ID NO: 44 - RNA, 19 nt, Artificial Sequence
  Synthetic
gcugaugaaggccuucgag

SEQ ID NO: 45 - RNA, 19 nt, Artificial Sequence
  Synthetic
cugaugaaggccuucgagu

SEQ ID NO: 46 - RNA, 19 nt, Artificial Sequence
  Synthetic
ugaugaaggccuucgaguc

SEQ ID NO: 47 - RNA, 19 nt, Artificial Sequence
  Synthetic
gaugaaggccuucgagucc

SEQ ID NO: 48 - RNA, 19 nt, Artificial Sequence
  Synthetic
augaaggccuucgaguccc

SEQ ID NO: 49 - RNA, 19 nt, Artificial Sequence
  Synthetic
ugaaggccuucgagucccu

SEQ ID NO: 50 - RNA, 19 nt, Artificial Sequence
  Synthetic
gaaggccuucgagucccuc

SEQ ID NO: 51 - RNA, 19 nt, Artificial Sequence
  Synthetic
aaggccuucgagucccuca

SEQ ID NO: 52 - RNA, 19 nt, Artificial Sequence
  Synthetic
aggccuucgagucccucaa

SEQ ID NO: 53 - RNA, 19 nt, Artificial Sequence
  Synthetic
ggccuucgagucccucaag

SEQ ID NO: 54 - RNA, 19 nt, Artificial Sequence
  Synthetic
gccuucgagucccucaagu

SEQ ID NO: 55 - RNA, 18 nt, Artificial Sequence
  Synthetic
ccuucgagucccucaagu

SEQ ID NO: 56 - RNA, 19 nt, Artificial Sequence
  Synthetic
gaaaagcugaugaaggccg

SEQ ID NO: 57 - RNA, 19 nt, Artificial Sequence
  Synthetic
aaaagcugaugaaggccgc

SEQ ID NO: 58 - RNA, 19 nt, Artificial Sequence
  Synthetic
aaagcugaugaaggccgcc

SEQ ID NO: 59 - RNA, 19 nt, Artificial Sequence
  Synthetic
aagcugaugaaggccgccu

SEQ ID NO: 60 - RNA, 19 nt, Artificial Sequence
  Synthetic
agcugaugaaggccgccuu

SEQ ID NO: 61 - RNA, 19 nt, Artificial Sequence
  Synthetic
gcugaugaaggccgccuuc

SEQ ID NO: 62 - RNA, 19 nt, Artificial Sequence
  Synthetic
cugaugaaggccgccuucg

SEQ ID NO: 63 - RNA, 19 nt, Artificial Sequence
  Synthetic
ugaugaaggccgccuucga

SEQ ID NO: 64 - RNA, 19 nt, Artificial Sequence
  Synthetic
gaugaaggccgccuucgag

SEQ ID NO: 65 - RNA, 19 nt, Artificial Sequence
  Synthetic
augaaggccgccuucgagu

SEQ ID NO: 66 - RNA, 19 nt, Artificial Sequence
  Synthetic
ugaaggccgccuucgaguc

SEQ ID NO: 67 - RNA, 19 nt, Artificial Sequence
  Synthetic
gaaggccgccuucgagucc

SEQ ID NO: 68 - RNA, 19 nt, Artificial Sequence
  Synthetic
aaggccgccuucgaguccc

SEQ ID NO: 69 - RNA, 19 nt, Artificial Sequence
  Synthetic
aggccgccuucgagucccu

SEQ ID NO: 70 - RNA, 19 nt, Artificial Sequence
  Synthetic
ggccgccuucgagucccuc

SEQ ID NO: 71 - RNA, 19 nt, Artificial Sequence
  Synthetic
gccgccuucgagucccuca

SEQ ID NO: 72 - RNA, 19 nt, Artificial Sequence
  Synthetic
ccgccuucgagucccucaa

SEQ ID NO: 73 - RNA, 19 nt, Artificial Sequence
  Synthetic
cgccuucgagucccucaag

SEQ ID NO: 74 - RNA, 19 nt, Artificial Sequence
  Synthetic
uuuuguuaaaggccuucau

SEQ ID NO: 75 - RNA, 19 nt, Artificial Sequence
  Synthetic
uuuguuaaaggccuucaua

SEQ ID NO: 76 - RNA, 19 nt, Artificial Sequence
  Synthetic
uuguuaaaggccuucauag

SEQ ID NO: 77 - RNA, 19 nt, Artificial Sequence
  Synthetic
uguuaaaggccuucauagc

SEQ ID NO: 78 - RNA, 19 nt, Artificial Sequence
  Synthetic
guuaaaggccuucauagcg

SEQ ID NO: 79 - RNA, 19 nt, Artificial Sequence
  Synthetic
uuaaaggccuucauagcga

SEQ ID NO: 80 - RNA, 19 nt, Artificial Sequence
  Synthetic
uaaaggccuucauagcgaa

SEQ ID NO: 81 - RNA, 19 nt, Artificial Sequence
  Synthetic
aaaggccuucauagcgaac

SEQ ID NO: 82 - RNA, 19 nt, Artificial Sequence
  Synthetic
aaggccuucauagcgaacc

SEQ ID NO: 83 - RNA, 19 nt, Artificial Sequence
  Synthetic
aggccuucauagcgaaccu

SEQ ID NO: 84 - RNA, 19 nt, Artificial Sequence
  Synthetic
ggccuucauagcgaaccug

SEQ ID NO: 85 - RNA, 19 nt, Artificial Sequence
  Synthetic
gccuucauagcgaaccuga

SEQ ID NO: 86 - RNA, 19 nt, Artificial Sequence
  Synthetic
ccuucauagcgaaccugaa

SEQ ID NO: 87 - RNA, 19 nt, Artificial Sequence
  Synthetic
cuucauagcgaaccugaag

SEQ ID NO: 88 - RNA, 19 nt, Artificial Sequence
  Synthetic
uucauagcgaaccugaagu

SEQ ID NO: 89 - RNA, 19 nt, Artificial Sequence
  Synthetic
ucauagcgaaccugaaguc

SEQ ID NO: 90 - RNA, 19 nt, Artificial Sequence
  Synthetic
cauagcgaaccugaaguca

SEQ ID NO: 91 - RNA, 19 nt, Artificial Sequence
  Synthetic
auagcgaaccugaagucaa

SEQ ID NO: 92 - RNA, 19 nt, Artificial Sequence
  Synthetic
uagcgaaccugaagucaag

SEQ ID NO: 93 - RNA, 19 nt, Artificial Sequence
  Synthetic
uuuuguuaaaggccuucac

SEQ ID NO: 94 - RNA, 19 nt, Artificial Sequence
  Synthetic
uuuguuaaaggccuucaca

SEQ ID NO: 95 - RNA, 19 nt, Artificial Sequence
  Synthetic
uuguuaaaggccuucacag

SEQ ID NO: 96 - RNA, 19 nt, Artificial Sequence
  Synthetic
uguuaaaggccuucacagc

SEQ ID NO: 97 - RNA, 19 nt, Artificial Sequence
  Synthetic
guuaaaggccuucacagcg

SEQ ID NO: 98 - RNA, 19 nt, Artificial Sequence
  Synthetic
uuaaaggccuucacagcga

SEQ ID NO: 99 - RNA, 19 nt, Artificial Sequence
  Synthetic
uaaaggccuucacagcgaa

SEQ ID NO: 100 - RNA, 19 nt, Artificial Sequence
  Synthetic
aaaggccuucacagcgaac

SEQ ID NO: 101 - RNA, 19 nt, Artificial Sequence
  Synthetic
aaggccuucacagcgaacc

SEQ ID NO: 102 - RNA, 19 nt, Artificial Sequence
  Synthetic
aggccuucacagcgaaccu

SEQ ID NO: 103 - RNA, 19 nt, Artificial Sequence
  Synthetic
ggccuucacagcgaaccug

SEQ ID NO: 104 - RNA, 19 nt, Artificial Sequence
  Synthetic
gccuucacagcgaaccuga

SEQ ID NO: 105 - RNA, 19 nt, Artificial Sequence
  Synthetic
ccuucacagcgaaccugaa

SEQ ID NO: 106 - RNA, 19 nt, Artificial Sequence
  Synthetic
cuucacagcgaaccugaag

SEQ ID NO: 107 - RNA, 19 nt, Artificial Sequence
  Synthetic
uucacagcgaaccugaagu

SEQ ID NO: 108 - RNA, 19 nt, Artificial Sequence
  Synthetic
ucacagcgaaccugaaguc

SEQ ID NO: 109 - RNA, 19 nt, Artificial Sequence
  Synthetic
cacagcgaaccugaaguca

SEQ ID NO: 110 - RNA, 19 nt, Artificial Sequence
  Synthetic
acagcgaaccugaagucaa

SEQ ID NO: 111 - RNA, 19 nt, Artificial Sequence
  Synthetic
cagcgaaccugaagucaag

SEQ ID NO: 112 - RNA, 19 nt, Artificial Sequence
  Synthetic
uuggcuacuaaaugugcuc

SEQ ID NO: 113 - RNA, 19 nt, Artificial Sequence
  Synthetic
uggcuacuaaaugugcucu

SEQ ID NO: 114 - RNA, 19 nt, Artificial Sequence
  Synthetic
ggcuacuaaaugugcucuu

SEQ ID NO: 115 - RNA, 19 nt, Artificial Sequence
  Synthetic
gcuacuaaaugugcucuua

SEQ ID NO: 116 - RNA, 19 nt, Artificial Sequence
  Synthetic
cuacuaaaugugcucuuag

SEQ ID NO: 117 - RNA, 19 nt, Artificial Sequence
  Synthetic
uacuaaaugugcucuuagg

SEQ ID NO: 118 - RNA, 19 nt, Artificial Sequence
  Synthetic
acuaaaugugcucuuaggc

SEQ ID NO: 119 - RNA, 19 nt, Artificial Sequence
  Synthetic
cuaaaugugcucuuaggcu

SEQ ID NO: 120 - RNA, 19 nt, Artificial Sequence
  Synthetic
uaaaugugcucuuaggcuu

SEQ ID NO: 121 - RNA, 19 nt, Artificial Sequence
  Synthetic
aaaugugcucuuaggcuua

SEQ ID NO: 122 - RNA, 19 nt, Artificial Sequence
  Synthetic
aaugugcucuuaggcuuac

SEQ ID NO: 123 - RNA, 19 nt, Artificial Sequence
  Synthetic
augugcucuuaggcuuacu

SEQ ID NO: 124 - RNA, 19 nt, Artificial Sequence
  Synthetic
ugugcucuuaggcuuacuc

SEQ ID NO: 125 - RNA, 19 nt, Artificial Sequence
  Synthetic
gugcucuuaggcuuacucg

SEQ ID NO: 126 - RNA, 19 nt, Artificial Sequence
  Synthetic
ugcucuuaggcuuacucgu

SEQ ID NO: 127 - RNA, 19 nt, Artificial Sequence
  Synthetic
gcucuuaggcuuacucguu

SEQ ID NO: 128 - RNA, 19 nt, Artificial Sequence
  Synthetic
cucuuaggcuuacucguuc

SEQ ID NO: 129 - RNA, 19 nt, Artificial Sequence
  Synthetic
ucuuaggcuuacucguucc

SEQ ID NO: 130 - RNA, 19 nt, Artificial Sequence
  Synthetic
cuuaggcuuacucguuccu

SEQ ID NO: 131 - RNA, 19 nt, Artificial Sequence
  Synthetic
uuggcuacuaaaugugcug

SEQ ID NO: 132 - RNA, 19 nt, Artificial Sequence
  Synthetic
uggcuacuaaaugugcugu

SEQ ID NO: 133 - RNA, 19 nt, Artificial Sequence
  Synthetic
ggcuacuaaaugugcuguu

SEQ ID NO: 134 - RNA, 19 nt, Artificial Sequence
  Synthetic
gcuacuaaaugugcuguua

SEQ ID NO: 135 - RNA, 19 nt, Artificial Sequence
  Synthetic
cuacuaaaugugcuguuag

SEQ ID NO: 136 - RNA, 19 nt, Artificial Sequence
  Synthetic
uacuaaaugugcuguuagg

SEQ ID NO: 137 - RNA, 19 nt, Artificial Sequence
  Synthetic
acuaaaugugcuguuaggc

SEQ ID NO: 138 - RNA, 19 nt, Artificial Sequence
  Synthetic
cuaaaugugcuguuaggcu

SEQ ID NO: 139 - RNA, 19 nt, Artificial Sequence
  Synthetic
uaaaugugcuguuaggcuu

SEQ ID NO: 140 - RNA, 19 nt, Artificial Sequence
  Synthetic
aaaugugcuguuaggcuua

SEQ ID NO: 141 - RNA, 19 nt, Artificial Sequence
  Synthetic
aaugugcuguuaggcuuac

SEQ ID NO: 142 - RNA, 19 nt, Artificial Sequence
  Synthetic
augugcuguuaggcuuacu

SEQ ID NO: 143 - RNA, 19 nt, Artificial Sequence
  Synthetic
ugugcuguuaggcuuacuc

SEQ ID NO: 144 - RNA, 19 nt, Artificial Sequence
  Synthetic
gugcuguuaggcuuacucg

SEQ ID NO: 145 - RNA, 19 nt, Artificial Sequence
  Synthetic
ugcuguuaggcuuacucgu

SEQ ID NO: 146 - RNA, 19 nt, Artificial Sequence
  Synthetic
gcuguuaggcuuacucguu

SEQ ID NO: 147 - RNA, 19 nt, Artificial Sequence
  Synthetic
cuguuaggcuuacucguuc

SEQ ID NO: 148 - RNA, 19 nt, Artificial Sequence
  Synthetic
uguuaggcuuacucguucc

SEQ ID NO: 149 - RNA, 19 nt, Artificial Sequence
  Synthetic
guuaggcuuacucguuccu

SEQ ID NO: 150 - RNA, 19 nt, Artificial Sequence
  Synthetic
gcuucugcaaacccugacc

SEQ ID NO: 151 - RNA, 19 nt, Artificial Sequence
  Synthetic
cuucugcaaacccugaccg

SEQ ID NO: 152 - RNA, 19 nt, Artificial Sequence
  Synthetic
uucugcaaacccugaccgc

SEQ ID NO: 153 - RNA, 19 nt, Artificial Sequence
  Synthetic
ucugcaaacccugaccgca

SEQ ID NO: 154 - RNA, 19 nt, Artificial Sequence
  Synthetic
cugcaaacccugaccgcag

SEQ ID NO: 155 - RNA, 19 nt, Artificial Sequence
  Synthetic
ugcaaacccugaccgcagu

SEQ ID NO: 156 - RNA, 19 nt, Artificial Sequence
  Synthetic
gcaaacccugaccgcaguc

SEQ ID NO: 157 - RNA, 19 nt, Artificial Sequence
  Synthetic
caaacccugaccgcagucg

SEQ ID NO: 158 - RNA, 19 nt, Artificial Sequence
  Synthetic
aaacccugaccgcagucgg

SEQ ID NO: 159 - RNA, 19 nt, Artificial Sequence
  Synthetic
aacccugaccgcagucggg

SEQ ID NO: 160 - RNA, 19 nt, Artificial Sequence
  Synthetic
acccugaccgcagucgggg

SEQ ID NO: 161 - RNA, 19 nt, Artificial Sequence
  Synthetic
cccugaccgcagucggggg

SEQ ID NO: 162 - RNA, 19 nt, Artificial Sequence
  Synthetic
ccugaccgcagucgggggc

SEQ ID NO: 163 - RNA, 19 nt, Artificial Sequence
  Synthetic
cugaccgcagucgggggca

SEQ ID NO: 164 - RNA, 19 nt, Artificial Sequence
  Synthetic
ugaccgcagucgggggcau

SEQ ID NO: 165 - RNA, 19 nt, Artificial Sequence
  Synthetic
gaccgcagucgggggcauu

SEQ ID NO: 166 - RNA, 19 nt, Artificial Sequence
  Synthetic
accgcagucgggggcauug

SEQ ID NO: 167 - RNA, 19 nt, Artificial Sequence
  Synthetic
ccgcagucgggggcauugg

SEQ ID NO: 168 - RNA, 19 nt, Artificial Sequence
  Synthetic
cgcagucgggggcauuggg

SEQ ID NO: 169 - RNA, 19 nt, Artificial Sequence
  Synthetic
gcuucugcaaacccugacu

SEQ ID NO: 170 - RNA, 19 nt, Artificial Sequence
  Synthetic
cuucugcaaacccugacug

SEQ ID NO: 171 - RNA, 19 nt, Artificial Sequence
  Synthetic
uucugcaaacccugacugc

SEQ ID NO: 172 - RNA, 19 nt, Artificial Sequence
  Synthetic
ucugcaaacccugacugca

SEQ ID NO: 173 - RNA, 19 nt, Artificial Sequence
  Synthetic
cugcaaacccugacugcag

SEQ ID NO: 174 - RNA, 19 nt, Artificial Sequence
  Synthetic
ugcaaacccugacugcagu

SEQ ID NO: 175 - RNA, 19 nt, Artificial Sequence
  Synthetic
gcaaacccugacugcaguc

SEQ ID NO: 176 - RNA, 19 nt, Artificial Sequence
  Synthetic
caaacccugacugcagucg

SEQ ID NO: 177 - RNA, 19 nt, Artificial Sequence
  Synthetic
aaacccugacugcagucgg

SEQ ID NO: 178 - RNA, 19 nt, Artificial Sequence
  Synthetic
aacccugacugcagucggg

SEQ ID NO: 179 - RNA, 19 nt, Artificial Sequence
  Synthetic
acccugacugcagucgggg

SEQ ID NO: 180 - RNA, 19 nt, Artificial Sequence
  Synthetic
cccugacugcagucggggg

SEQ ID NO: 181 - RNA, 19 nt, Artificial Sequence
  Synthetic
ccugacugcagucgggggc

SEQ ID NO: 182 - RNA, 19 nt, Artificial Sequence
  Synthetic
cugacugcagucgggggca

SEQ ID NO: 183 - RNA, 19 nt, Artificial Sequence
  Synthetic
ugacugcagucgggggcau

SEQ ID NO: 184 - RNA, 19 nt, Artificial Sequence
  Synthetic
gacugcagucgggggcauu

SEQ ID NO: 185 - RNA, 19 nt, Artificial Sequence
  Synthetic
acugcagucgggggcauug

SEQ ID NO: 186 - RNA, 19 nt, Artificial Sequence
  Synthetic
cugcagucgggggcauugg

SEQ ID NO: 187 - RNA, 19 nt, Artificial Sequence
  Synthetic
ugcagucgggggcauuggg

SEQ ID NO: 188 - RNA, 19 nt, Artificial Sequence
  Synthetic
ggcggacucaguggaucug

SEQ ID NO: 189 - RNA, 19 nt, Artificial Sequence
  Synthetic
gcggacucaguggaucugg

SEQ ID NO: 190 - RNA, 19 nt, Artificial Sequence
  Synthetic
cggacucaguggaucuggc

SEQ ID NO: 191 - RNA, 19 nt, Artificial Sequence
  Synthetic
ggacucaguggaucuggcc

SEQ ID NO: 192 - RNA, 19 nt, Artificial Sequence
  Synthetic
gacucaguggaucuggcca

SEQ ID NO: 193 - RNA, 19 nt, Artificial Sequence
  Synthetic
acucaguggaucuggccag

SEQ ID NO: 194 - RNA, 19 nt, Artificial Sequence
  Synthetic
cucaguggaucuggccagc

SEQ ID NO: 195 - RNA, 19 nt, Artificial Sequence
  Synthetic
ucaguggaucuggccagcu

SEQ ID NO: 196 - RNA, 19 nt, Artificial Sequence
  Synthetic
caguggaucuggccagcug

SEQ ID NO: 197 - RNA, 19 nt, Artificial Sequence
  Synthetic
aguggaucuggccagcugu

SEQ ID NO: 198 - RNA, 19 nt, Artificial Sequence
  Synthetic
guggaucuggccagcugug

SEQ ID NO: 199 - RNA, 19 nt, Artificial Sequence
  Synthetic
uggaucuggccagcuguga

SEQ ID NO: 200 - RNA, 19 nt, Artificial Sequence
  Synthetic
ggaucuggccagcugugac

SEQ ID NO: 201 - RNA, 19 nt, Artificial Sequence
  Synthetic
gaucuggccagcugugacu

SEQ ID NO: 202 - RNA, 19 nt, Artificial Sequence
  Synthetic
aucuggccagcugugacuu

SEQ ID NO: 203 - RNA, 19 nt, Artificial Sequence
  Synthetic
ucuggccagcugugacuug

SEQ ID NO: 204 - RNA, 19 nt, Artificial Sequence
  Synthetic
cuggccagcugugacuuga

SEQ ID NO: 205 - RNA, 19 nt, Artificial Sequence
  Synthetic
uggccagcugugacuugac

SEQ ID NO: 206 - RNA, 19 nt, Artificial Sequence
  Synthetic
ggccagcugugacuugaca

SEQ ID NO: 207 - RNA, 19 nt, Artificial Sequence
  Synthetic
ggcggacucaguggaucua

SEQ ID NO: 208 - RNA, 19 nt, Artificial Sequence
  Synthetic
gcggacucaguggaucuag

SEQ ID NO: 209 - RNA, 19 nt, Artificial Sequence
  Synthetic
cggacucaguggaucuagc

SEQ ID NO: 210 - RNA, 19 nt, Artificial Sequence
  Synthetic
ggacucaguggaucuagcc

SEQ ID NO: 211 - RNA, 19 nt, Artificial Sequence
  Synthetic
gacucaguggaucuagcca

SEQ ID NO: 212 - RNA, 19 nt, Artificial Sequence
  Synthetic
acucaguggaucuagccag

SEQ ID NO: 213 - RNA, 19 nt, Artificial Sequence
  Synthetic
cucaguggaucuagccagc

SEQ ID NO: 214 - RNA, 19 nt, Artificial Sequence
  Synthetic
ucaguggaucuagccagcu

SEQ ID NO: 215 - RNA, 19 nt, Artificial Sequence
  Synthetic
caguggaucuagccagcug

SEQ ID NO: 216 - RNA, 19 nt, Artificial Sequence
  Synthetic
aguggaucuagccagcugu

SEQ ID NO: 217 - RNA, 19 nt, Artificial Sequence
  Synthetic
guggaucuagccagcugug

SEQ ID NO: 218 - RNA, 19 nt, Artificial Sequence
  Synthetic
uggaucuagccagcuguga

SEQ ID NO: 219 - RNA, 19 nt, Artificial Sequence
  Synthetic
ggaucuagccagcugugac

SEQ ID NO: 220 - RNA, 19 nt, Artificial Sequence
  Synthetic
gaucuagccagcugugacu

SEQ ID NO: 221 - RNA, 19 nt, Artificial Sequence
  Synthetic
aucuagccagcugugacuu

SEQ ID NO: 222 - RNA, 19 nt, Artificial Sequence
  Synthetic
ucuagccagcugugacuug

SEQ ID NO: 223 - RNA, 19 nt, Artificial Sequence
  Synthetic
cuagccagcugugacuuga

SEQ ID NO: 224 - RNA, 19 nt, Artificial Sequence
  Synthetic
uagccagcugugacuugac

SEQ ID NO: 225 - RNA, 19 nt, Artificial Sequence
  Synthetic
agccagcugugacuugaca

SEQ ID NO: 226 - RNA, 19 nt, Artificial Sequence
  Synthetic
gcagaaaacuuacacagag

SEQ ID NO: 227 - RNA, 19 nt, Artificial Sequence
  Synthetic
cagaaaacuuacacagagg

SEQ ID NO: 228 - RNA, 19 nt, Artificial Sequence
  Synthetic
agaaaacuuacacagaggg

SEQ ID NO: 229 - RNA, 19 nt, Artificial Sequence
  Synthetic
gaaaacuuacacagagggg

SEQ ID NO: 230 - RNA, 19 nt, Artificial Sequence
  Synthetic
aaaacuuacacagaggggc

SEQ ID NO: 231 - RNA, 19 nt, Artificial Sequence
  Synthetic
aaacuuacacagaggggcu

SEQ ID NO: 232 - RNA, 19 nt, Artificial Sequence
  Synthetic
aacuuacacagaggggcuc

SEQ ID NO: 233 - RNA, 19 nt, Artificial Sequence
  Synthetic
acuuacacagaggggcuca

SEQ ID NO: 234 - RNA, 19 nt, Artificial Sequence
  Synthetic
cuuacacagaggggcucau

SEQ ID NO: 235 - RNA, 19 nt, Artificial Sequence
  Synthetic
uuacacagaggggcucauc

SEQ ID NO: 236 - RNA, 19 nt, Artificial Sequence
  Synthetic
uacacagaggggcucauca

SEQ ID NO: 237 - RNA, 19 nt, Artificial Sequence
  Synthetic
acacagaggggcucaucau

SEQ ID NO: 238 - RNA, 19 nt, Artificial Sequence
  Synthetic
cacagaggggcucaucauu

SEQ ID NO: 239 - RNA, 19 nt, Artificial Sequence
  Synthetic
acagaggggcucaucauua

SEQ ID NO: 240 - RNA, 19 nt, Artificial Sequence
  Synthetic
cagaggggcucaucauuau

SEQ ID NO: 241 - RNA, 19 nt, Artificial Sequence
  Synthetic
agaggggcucaucauuaua

SEQ ID NO: 242 - RNA, 19 nt, Artificial Sequence
  Synthetic
gaggggcucaucauuauac

SEQ ID NO: 243 - RNA, 19 nt, Artificial Sequence
  Synthetic
aggggcucaucauuauaca

SEQ ID NO: 244 - RNA, 19 nt, Artificial Sequence
  Synthetic
ggggcucaucauuauacag

SEQ ID NO: 245 - RNA, 19 nt, Artificial Sequence
  Synthetic
gcagaaaacuuacacagaa

SEQ ID NO: 246 - RNA, 19 nt, Artificial Sequence
  Synthetic
cagaaaacuuacacagaag

SEQ ID NO: 247 - RNA, 19 nt, Artificial Sequence
  Synthetic
agaaaacuuacacagaagg

SEQ ID NO: 248 - RNA, 19 nt, Artificial Sequence
  Synthetic
gaaaacuuacacagaaggg

SEQ ID NO: 249 - RNA, 19 nt, Artificial Sequence
  Synthetic
aaaacuuacacagaagggc

SEQ ID NO: 250 - RNA, 19 nt, Artificial Sequence
  Synthetic
aaacuuacacagaagggcu

SEQ ID NO: 251 - RNA, 19 nt, Artificial Sequence
  Synthetic
aacuuacacagaagggcuc

SEQ ID NO: 252 - RNA, 19 nt, Artificial Sequence
  Synthetic
acuuacacagaagggcuca

SEQ ID NO: 253 - RNA, 19 nt, Artificial Sequence
  Synthetic
cuuacacagaagggcucau

SEQ ID NO: 254 - RNA, 19 nt, Artificial Sequence
  Synthetic
uuacacagaagggcucauc

SEQ ID NO: 255 - RNA, 19 nt, Artificial Sequence
  Synthetic
uacacagaagggcucauca

SEQ ID NO: 256 - RNA, 19 nt, Artificial Sequence
  Synthetic
acacagaagggcucaucau

SEQ ID NO: 257 - RNA, 19 nt, Artificial Sequence
  Synthetic
cacagaagggcucaucauu

SEQ ID NO: 258 - RNA, 19 nt, Artificial Sequence
  Synthetic
acagaagggcucaucauua

SEQ ID NO: 259 - RNA, 19 nt, Artificial Sequence
  Synthetic
cagaagggcucaucauuau

SEQ ID NO: 260 - RNA, 19 nt, Artificial Sequence
  Synthetic
agaagggcucaucauuaua

SEQ ID NO: 261 - RNA, 19 nt, Artificial Sequence
  Synthetic
gaagggcucaucauuauac

SEQ ID NO: 262 - RNA, 19 nt, Artificial Sequence
  Synthetic
aagggcucaucauuauaca

SEQ ID NO: 263 - RNA, 19 nt, Artificial Sequence
  Synthetic
agggcucaucauuauacag

SEQ ID NO: 264 - RNA, 19 nt, Artificial Sequence
  Synthetic
ucagcuugguucccauugg

SEQ ID NO: 265 - RNA, 19 nt, Artificial Sequence
  Synthetic
cagcuugguucccauugga

SEQ ID NO: 266 - RNA, 19 nt, Artificial Sequence
  Synthetic
agcuugguucccauuggau

SEQ ID NO: 267 - RNA, 19 nt, Artificial Sequence
  Synthetic
gcuugguucccauuggauc

SEQ ID NO: 268 - RNA, 19 nt, Artificial Sequence
  Synthetic
cuugguucccauuggaucu

SEQ ID NO: 269 - RNA, 19 nt, Artificial Sequence
  Synthetic
uugguucccauuggaucuc

SEQ ID NO: 270 - RNA, 19 nt, Artificial Sequence
  Synthetic
ugguucccauuggaucucu

SEQ ID NO: 271 - RNA, 19 nt, Artificial Sequence
  Synthetic
gguucccauuggaucucuc

SEQ ID NO: 272 - RNA, 19 nt, Artificial Sequence
  Synthetic
guucccauuggaucucuca

SEQ ID NO: 273 - RNA, 19 nt, Artificial Sequence
  Synthetic
uucccauuggaucucucag

SEQ ID NO: 274 - RNA, 19 nt, Artificial Sequence
  Synthetic
ucccauuggaucucucagc

SEQ ID NO: 275 - RNA, 19 nt, Artificial Sequence
  Synthetic
cccauuggaucucucagcc

SEQ ID NO: 276 - RNA, 19 nt, Artificial Sequence
  Synthetic
ccauuggaucucucagccc

SEQ ID NO: 277 - RNA, 19 nt, Artificial Sequence
  Synthetic
cauuggaucucucagccca

SEQ ID NO: 278 - RNA, 19 nt, Artificial Sequence
  Synthetic
auuggaucucucagcccau

SEQ ID NO: 279 - RNA, 19 nt, Artificial Sequence
  Synthetic
uuggaucucucagcccauc

SEQ ID NO: 280 - RNA, 19 nt, Artificial Sequence
  Synthetic
uggaucucucagcccauca

SEQ ID NO: 281 - RNA, 19 nt, Artificial Sequence
  Synthetic
ggaucucucagcccaucaa

SEQ ID NO: 282 - RNA, 19 nt, Artificial Sequence
  Synthetic
gaucucucagcccaucaag

SEQ ID NO: 283 - RNA, 19 nt, Artificial Sequence
  Synthetic
ucagcuugguucccauuga

SEQ ID NO: 284 - RNA, 19 nt, Artificial Sequence
  Synthetic
cagcuugguucccauugaa

SEQ ID NO: 285 - RNA, 19 nt, Artificial Sequence
  Synthetic
agcuugguucccauugaau

SEQ ID NO: 286 - RNA, 19 nt, Artificial Sequence
  Synthetic
gcuugguucccauugaauc

SEQ ID NO: 287 - RNA, 19 nt, Artificial Sequence
  Synthetic
cuugguucccauugaaucu

SEQ ID NO: 288 - RNA, 19 nt, Artificial Sequence
  Synthetic
uugguucccauugaaucuc

SEQ ID NO: 289 - RNA, 19 nt, Artificial Sequence
  Synthetic
ugguucccauugaaucucu

SEQ ID NO: 290 - RNA, 19 nt, Artificial Sequence
  Synthetic
gguucccauugaaucucuc

SEQ ID NO: 291 - RNA, 19 nt, Artificial Sequence
  Synthetic
guucccauugaaucucuca

SEQ ID NO: 292 - RNA, 19 nt, Artificial Sequence
  Synthetic
uucccauugaaucucucag

SEQ ID NO: 293 - RNA, 19 nt, Artificial Sequence
  Synthetic
ucccauugaaucucucagc

SEQ ID NO: 294 - RNA, 19 nt, Artificial Sequence
  Synthetic
cccauugaaucucucagcc

SEQ ID NO: 295 - RNA, 19 nt, Artificial Sequence
  Synthetic
ccauugaaucucucagccc

SEQ ID NO: 296 - RNA, 19 nt, Artificial Sequence
  Synthetic
cauugaaucucucagccca

SEQ ID NO: 297 - RNA, 19 nt, Artificial Sequence
  Synthetic
auugaaucucucagcccau

SEQ ID NO: 298 - RNA, 19 nt, Artificial Sequence
  Synthetic
uugaaucucucagcccauc

SEQ ID NO: 299 - RNA, 19 nt, Artificial Sequence
  Synthetic
ugaaucucucagcccauca

SEQ ID NO: 300 - RNA, 19 nt, Artificial Sequence
  Synthetic
gaaucucucagcccaucaa

SEQ ID NO: 301 - RNA, 19 nt, Artificial Sequence
  Synthetic
aaucucucagcccaucaag

SEQ ID NO: 302 - RNA, 19 nt, Artificial Sequence
  Synthetic
ucagcuugguucccauugc

SEQ ID NO: 303 - RNA, 19 nt, Artificial Sequence
  Synthetic
cagcuugguucccauugca

SEQ ID NO: 304 - RNA, 19 nt, Artificial Sequence
  Synthetic
agcuugguucccauugcau

SEQ ID NO: 305 - RNA, 19 nt, Artificial Sequence
  Synthetic
gcuugguucccauugcauc

SEQ ID NO: 306 - RNA, 19 nt, Artificial Sequence
  Synthetic
cuugguucccauugcaucu

SEQ ID NO: 307 - RNA, 19 nt, Artificial Sequence
  Synthetic
uugguucccauugcaucuc

SEQ ID NO: 308 - RNA, 19 nt, Artificial Sequence
  Synthetic
ugguucccauugcaucucu

SEQ ID NO: 309 - RNA, 19 nt, Artificial Sequence
  Synthetic
gguucccauugcaucucuc

SEQ ID NO: 310 - RNA, 19 nt, Artificial Sequence
  Synthetic
guucccauugcaucucuca

SEQ ID NO: 311 - RNA, 19 nt, Artificial Sequence
  Synthetic
uucccauugcaucucucag

SEQ ID NO: 312 - RNA, 19 nt, Artificial Sequence
  Synthetic
ucccauugcaucucucagc

SEQ ID NO: 313 - RNA, 19 nt, Artificial Sequence
  Synthetic
cccauugcaucucucagcc

SEQ ID NO: 314 - RNA, 19 nt, Artificial Sequence
  Synthetic
ccauugcaucucucagccc

SEQ ID NO: 315 - RNA, 19 nt, Artificial Sequence
  Synthetic
cauugcaucucucagccca

SEQ ID NO: 316 - RNA, 19 nt, Artificial Sequence
  Synthetic
auugcaucucucagcccau

SEQ ID NO: 317 - RNA, 19 nt, Artificial Sequence
  Synthetic
uugcaucucucagcccauc

SEQ ID NO: 318 - RNA, 19 nt, Artificial Sequence
  Synthetic
ugcaucucucagcccauca

SEQ ID NO: 319 - RNA, 19 nt, Artificial Sequence
  Synthetic
gcaucucucagcccaucaa

SEQ ID NO: 320 - RNA, 19 nt, Artificial Sequence
  Synthetic
caucucucagcccaucaag

SEQ ID NO: 321 - RNA, 19 nt, Artificial Sequence
  Synthetic
gggccucugaagaagaagc

SEQ ID NO: 322 - RNA, 19 nt, Artificial Sequence
  Synthetic
ggccucugaagaagaagcc

SEQ ID NO: 323 - RNA, 19 nt, Artificial Sequence
  Synthetic
gccucugaagaagaagcca

SEQ ID NO: 324 - RNA, 19 nt, Artificial Sequence
  Synthetic
ccucugaagaagaagccaa

SEQ ID NO: 325 - RNA, 19 nt, Artificial Sequence
  Synthetic
cucugaagaagaagccaac

SEQ ID NO: 326 - RNA, 19 nt, Artificial Sequence
  Synthetic
ucugaagaagaagccaacc

SEQ ID NO: 327 - RNA, 19 nt, Artificial Sequence
  Synthetic
cugaagaagaagccaaccc

SEQ ID NO: 328 - RNA, 19 nt, Artificial Sequence
  Synthetic
ugaagaagaagccaaccca

SEQ ID NO: 329 - RNA, 19 nt, Artificial Sequence
  Synthetic
gaagaagaagccaacccag

SEQ ID NO: 330 - RNA, 19 nt, Artificial Sequence
  Synthetic
aagaagaagccaacccagc

SEQ ID NO: 331 - RNA, 19 nt, Artificial Sequence
  Synthetic
agaagaagccaacccagca

SEQ ID NO: 332 - RNA, 19 nt, Artificial Sequence
  Synthetic
gaagaagccaacccagcag

SEQ ID NO: 333 - RNA, 19 nt, Artificial Sequence
  Synthetic
aagaagccaacccagcagc

SEQ ID NO: 334 - RNA, 19 nt, Artificial Sequence
  Synthetic
agaagccaacccagcagcc

SEQ ID NO: 335 - RNA, 19 nt, Artificial Sequence
  Synthetic
gaagccaacccagcagcca

SEQ ID NO: 336 - RNA, 19 nt, Artificial Sequence
  Synthetic
aagccaacccagcagccac

SEQ ID NO: 337 - RNA, 19 nt, Artificial Sequence
  Synthetic
agccaacccagcagccacc

SEQ ID NO: 338 - RNA, 19 nt, Artificial Sequence
  Synthetic
gccaacccagcagccacca

SEQ ID NO: 339 - RNA, 19 nt, Artificial Sequence
  Synthetic
ccaacccagcagccaccaa

SEQ ID NO: 340 - RNA, 19 nt, Artificial Sequence
  Synthetic
gggccucugaagaagaagg

SEQ ID NO: 341 - RNA, 19 nt, Artificial Sequence
  Synthetic
ggccucugaagaagaaggc

SEQ ID NO: 342 - RNA, 19 nt, Artificial Sequence
  Synthetic
gccucugaagaagaaggca

SEQ ID NO: 343 - RNA, 19 nt, Artificial Sequence
  Synthetic
ccucugaagaagaaggcaa

SEQ ID NO: 344 - RNA, 19 nt, Artificial Sequence
  Synthetic
cucugaagaagaaggcaac

SEQ ID NO: 345 - RNA, 19 nt, Artificial Sequence
  Synthetic
ucugaagaagaaggcaacc

SEQ ID NO: 346 - RNA, 19 nt, Artificial Sequence
  Synthetic
cugaagaagaaggcaaccc

SEQ ID NO: 347 - RNA, 19 nt, Artificial Sequence
  Synthetic
ugaagaagaaggcaaccca

SEQ ID NO: 348 - RNA, 19 nt, Artificial Sequence
  Synthetic
gaagaagaaggcaacccag

SEQ ID NO: 349 - RNA, 19 nt, Artificial Sequence
  Synthetic
aagaagaaggcaacccagc

SEQ ID NO: 350 - RNA, 19 nt, Artificial Sequence
  Synthetic
agaagaaggcaacccagca

SEQ ID NO: 351 - RNA, 19 nt, Artificial Sequence
  Synthetic
gaagaaggcaacccagcag

SEQ ID NO: 352 - RNA, 19 nt, Artificial Sequence
  Synthetic
aagaaggcaacccagcagc

SEQ ID NO: 353 - RNA, 19 nt, Artificial Sequence
  Synthetic
agaaggcaacccagcagcc

SEQ ID NO: 354 - RNA, 19 nt, Artificial Sequence
  Synthetic
gaaggcaacccagcagcca

SEQ ID NO: 355 - RNA, 19 nt, Artificial Sequence
  Synthetic
aaggcaacccagcagccac

SEQ ID NO: 356 - RNA, 19 nt, Artificial Sequence
  Synthetic
aggcaacccagcagccacc

SEQ ID NO: 357 - RNA, 19 nt, Artificial Sequence
  Synthetic
ggcaacccagcagccacca

SEQ ID NO: 358 - RNA, 19 nt, Artificial Sequence
  Synthetic
gcaacccagcagccaccaa

SEQ ID NO: 359 - RNA, 19 nt, Artificial Sequence
  Synthetic
cuggacccgcaauaaaggc

SEQ ID NO: 360 - RNA, 19 nt, Artificial Sequence
  Synthetic
uggacccgcaauaaaggca

SEQ ID NO: 361 - RNA, 19 nt, Artificial Sequence
  Synthetic
ggacccgcaauaaaggcag

SEQ ID NO: 362 - RNA, 19 nt, Artificial Sequence
  Synthetic
gacccgcaauaaaggcagc

SEQ ID NO: 363 - RNA, 19 nt, Artificial Sequence
  Synthetic
acccgcaauaaaggcagcc

SEQ ID NO: 364 - RNA, 19 nt, Artificial Sequence
  Synthetic
cccgcaauaaaggcagccu

SEQ ID NO: 365 - RNA, 19 nt, Artificial Sequence
  Synthetic
ccgcaauaaaggcagccuu

SEQ ID NO: 366 - RNA, 19 nt, Artificial Sequence
  Synthetic
cgcaauaaaggcagccuug

SEQ ID NO: 367 - RNA, 19 nt, Artificial Sequence
  Synthetic
gcaauaaaggcagccuugc

SEQ ID NO: 368 - RNA, 19 nt, Artificial Sequence
  Synthetic
caauaaaggcagccuugcc

SEQ ID NO: 369 - RNA, 19 nt, Artificial Sequence
  Synthetic
aauaaaggcagccuugccu

SEQ ID NO: 370 - RNA, 19 nt, Artificial Sequence
  Synthetic
auaaaggcagccuugccuu

SEQ ID NO: 371 - RNA, 19 nt, Artificial Sequence
  Synthetic
uaaaggcagccuugccuuc

SEQ ID NO: 372 - RNA, 19 nt, Artificial Sequence
  Synthetic
aaaggcagccuugccuucu

SEQ ID NO: 373 - RNA, 19 nt, Artificial Sequence
  Synthetic
aaggcagccuugccuucuc

SEQ ID NO: 374 - RNA, 19 nt, Artificial Sequence
  Synthetic
aggcagccuugccuucucu

SEQ ID NO: 375 - RNA, 19 nt, Artificial Sequence
  Synthetic
ggcagccuugccuucucua

SEQ ID NO: 376 - RNA, 19 nt, Artificial Sequence
  Synthetic
gcagccuugccuucucuaa

SEQ ID NO: 377 - RNA, 19 nt, Artificial Sequence
  Synthetic
cagccuugccuucucuaac

SEQ ID NO: 378 - RNA, 19 nt, Artificial Sequence
  Synthetic
cuggacccgcaauaaagga

SEQ ID NO: 379 - RNA, 19 nt, Artificial Sequence
  Synthetic
uggacccgcaauaaaggaa

SEQ ID NO: 380 - RNA, 19 nt, Artificial Sequence
  Synthetic
ggacccgcaauaaaggaag

SEQ ID NO: 381 - RNA, 19 nt, Artificial Sequence
  Synthetic
gacccgcaauaaaggaagc

SEQ ID NO: 382 - RNA, 19 nt, Artificial Sequence
  Synthetic
acccgcaauaaaggaagcc

SEQ ID NO: 383 - RNA, 19 nt, Artificial Sequence
  Synthetic
cccgcaauaaaggaagccu

SEQ ID NO: 384 - RNA, 19 nt, Artificial Sequence
  Synthetic
ccgcaauaaaggaagccuu

SEQ ID NO: 385 - RNA, 19 nt, Artificial Sequence
  Synthetic
cgcaauaaaggaagccuug

SEQ ID NO: 386 - RNA, 19 nt, Artificial Sequence
  Synthetic
gcaauaaaggaagccuugc

SEQ ID NO: 387 - RNA, 19 nt, Artificial Sequence
  Synthetic
caauaaaggaagccuugcc

SEQ ID NO: 388 - RNA, 19 nt, Artificial Sequence
  Synthetic
aauaaaggaagccuugccu

SEQ ID NO: 389 - RNA, 19 nt, Artificial Sequence
  Synthetic
auaaaggaagccuugccuu

SEQ ID NO: 390 - RNA, 19 nt, Artificial Sequence
  Synthetic
uaaaggaagccuugccuuc

SEQ ID NO: 391 - RNA, 19 nt, Artificial Sequence
  Synthetic
aaaggaagccuugccuucu

SEQ ID NO: 392 - RNA, 19 nt, Artificial Sequence
  Synthetic
aaggaagccuugccuucuc

SEQ ID NO: 393 - RNA, 19 nt, Artificial Sequence
  Synthetic
aggaagccuugccuucucu

SEQ ID NO: 394 - RNA, 19 nt, Artificial Sequence
  Synthetic
ggaagccuugccuucucua

SEQ ID NO: 395 - RNA, 19 nt, Artificial Sequence
  Synthetic
gaagccuugccuucucuaa

SEQ ID NO: 396 - RNA, 19 nt, Artificial Sequence
  Synthetic
aagccuugccuucucuaac

SEQ ID NO: 397 - RNA, 19 nt, Artificial Sequence
  Synthetic
agccuugccuucucuaaca

SEQ ID NO: 398 - RNA, 19 nt, Artificial Sequence
  Synthetic
gccuugccuucucuaacaa

SEQ ID NO: 399 - RNA, 19 nt, Artificial Sequence
  Synthetic
ccuugccuucucuaacaaa

SEQ ID NO: 400 - RNA, 19 nt, Artificial Sequence
  Synthetic
cuugccuucucuaacaaac

SEQ ID NO: 401 - RNA, 19 nt, Artificial Sequence
  Synthetic
uugccuucucuaacaaacc

SEQ ID NO: 402 - RNA, 19 nt, Artificial Sequence
  Synthetic
ugccuucucuaacaaaccc

SEQ ID NO: 403 - RNA, 19 nt, Artificial Sequence
  Synthetic
gccuucucuaacaaacccc

SEQ ID NO: 404 - RNA, 19 nt, Artificial Sequence
  Synthetic
ccuucucuaacaaaccccc

SEQ ID NO: 405 - RNA, 19 nt, Artificial Sequence
  Synthetic
cuucucuaacaaacccccc

SEQ ID NO: 406 - RNA, 19 nt, Artificial Sequence
  Synthetic
uucucuaacaaaccccccu

SEQ ID NO: 407 - RNA, 19 nt, Artificial Sequence
  Synthetic
ucucuaacaaaccccccuu

SEQ ID NO: 408 - RNA, 19 nt, Artificial Sequence
  Synthetic
cucuaacaaaccccccuuc

SEQ ID NO: 409 - RNA, 19 nt, Artificial Sequence
  Synthetic
ucuaacaaaccccccuucu

SEQ ID NO: 410 - RNA, 19 nt, Artificial Sequence
  Synthetic
cuaacaaaccccccuucuc

SEQ ID NO: 411 - RNA, 19 nt, Artificial Sequence
  Synthetic
uaacaaaccccccuucucu

SEQ ID NO: 412 - RNA, 19 nt, Artificial Sequence
  Synthetic
aacaaaccccccuucucua

SEQ ID NO: 413 - RNA, 19 nt, Artificial Sequence
  Synthetic
acaaaccccccuucucuaa

SEQ ID NO: 414 - RNA, 19 nt, Artificial Sequence
  Synthetic
gcagccuugccuucucuag

SEQ ID NO: 415 - RNA, 19 nt, Artificial Sequence
  Synthetic
cagccuugccuucucuagc

SEQ ID NO: 416 - RNA, 19 nt, Artificial Sequence
  Synthetic
agccuugccuucucuagca

SEQ ID NO: 417 - RNA, 19 nt, Artificial Sequence
  Synthetic
gccuugccuucucuagcaa

SEQ ID NO: 418 - RNA, 19 nt, Artificial Sequence
  Synthetic
ccuugccuucucuagcaaa

SEQ ID NO: 419 - RNA, 19 nt, Artificial Sequence
  Synthetic
cuugccuucucuagcaaac

SEQ ID NO: 420 - RNA, 19 nt, Artificial Sequence
  Synthetic
uugccuucucuagcaaacc

SEQ ID NO: 421 - RNA, 19 nt, Artificial Sequence
  Synthetic
ugccuucucuagcaaaccc

SEQ ID NO: 422 - RNA, 19 nt, Artificial Sequence
  Synthetic
gccuucucuagcaaacccc

SEQ ID NO: 423 - RNA, 19 nt, Artificial Sequence
  Synthetic
ccuucucuagcaaaccccc

SEQ ID NO: 424 - RNA, 19 nt, Artificial Sequence
  Synthetic
cuucucuagcaaacccccc

SEQ ID NO: 425 - RNA, 19 nt, Artificial Sequence
  Synthetic
uucucuagcaaaccccccu

SEQ ID NO: 426 - RNA, 19 nt, Artificial Sequence
  Synthetic
ucucuagcaaaccccccuu

SEQ ID NO: 427 - RNA, 19 nt, Artificial Sequence
  Synthetic
cucuagcaaaccccccuuc

SEQ ID NO: 428 - RNA, 19 nt, Artificial Sequence
  Synthetic
ucuagcaaaccccccuucu

SEQ ID NO: 429 - RNA, 19 nt, Artificial Sequence
  Synthetic
cuagcaaaccccccuucuc

SEQ ID NO: 430 - RNA, 19 nt, Artificial Sequence
  Synthetic
uagcaaaccccccuucucu

SEQ ID NO: 431 - RNA, 19 nt, Artificial Sequence
  Synthetic
agcaaaccccccuucucua

SEQ ID NO: 432 - RNA, 19 nt, Artificial Sequence
  Synthetic
gcaaaccccccuucucuaa

SEQ ID NO: 433 - RNA, 19 nt, Artificial Sequence
  Synthetic
aaaguuuggaggguuucuc

SEQ ID NO: 434 - RNA, 19 nt, Artificial Sequence
  Synthetic
aaguuuggaggguuucucc

SEQ ID NO: 435 - RNA, 19 nt, Artificial Sequence
  Synthetic
aguuuggaggguuucuccg

SEQ ID NO: 436 - RNA, 19 nt, Artificial Sequence
  Synthetic
guuuggaggguuucuccgc

SEQ ID NO: 437 - RNA, 19 nt, Artificial Sequence
  Synthetic
uuuggaggguuucuccgcu

SEQ ID NO: 438 - RNA, 19 nt, Artificial Sequence
  Synthetic
uuggaggguuucuccgcuc

SEQ ID NO: 439 - RNA, 19 nt, Artificial Sequence
  Synthetic
uggaggguuucuccgcuca

SEQ ID NO: 440 - RNA, 19 nt, Artificial Sequence
  Synthetic
ggaggguuucuccgcucag

SEQ ID NO: 441 - RNA, 19 nt, Artificial Sequence
  Synthetic
gaggguuucuccgcucagc

SEQ ID NO: 442 - RNA, 19 nt, Artificial Sequence
  Synthetic
aggguuucuccgcucagcc

SEQ ID NO: 443 - RNA, 19 nt, Artificial Sequence
  Synthetic
ggguuucuccgcucagccu

SEQ ID NO: 444 - RNA, 19 nt, Artificial Sequence
  Synthetic
gguuucuccgcucagccuu

SEQ ID NO: 445 - RNA, 19 nt, Artificial Sequence
  Synthetic
guuucuccgcucagccuug

SEQ ID NO: 446 - RNA, 19 nt, Artificial Sequence
  Synthetic
uuucuccgcucagccuugg

SEQ ID NO: 447 - RNA, 19 nt, Artificial Sequence
  Synthetic
uucuccgcucagccuugga

SEQ ID NO: 448 - RNA, 19 nt, Artificial Sequence
  Synthetic
ucuccgcucagccuuggau

SEQ ID NO: 449 - RNA, 19 nt, Artificial Sequence
  Synthetic
cuccgcucagccuuggaug

SEQ ID NO: 450 - RNA, 19 nt, Artificial Sequence
  Synthetic
uccgcucagccuuggaugu

SEQ ID NO: 451 - RNA, 19 nt, Artificial Sequence
  Synthetic
ccgcucagccuuggauguu

SEQ ID NO: 452 - RNA, 19 nt, Artificial Sequence
  Synthetic
aaaguuuggaggguuucuu

SEQ ID NO: 453 - RNA, 19 nt, Artificial Sequence
  Synthetic
aaguuuggaggguuucuuc

SEQ ID NO: 454 - RNA, 19 nt, Artificial Sequence
  Synthetic
aguuuggaggguuucuucg

SEQ ID NO: 455 - RNA, 19 nt, Artificial Sequence
  Synthetic
guuuggaggguuucuucgc

SEQ ID NO: 456 - RNA, 19 nt, Artificial Sequence
  Synthetic
uuuggaggguuucuucgcu

SEQ ID NO: 457 - RNA, 19 nt, Artificial Sequence
  Synthetic
uuggaggguuucuucgcuc

SEQ ID NO: 458 - RNA, 19 nt, Artificial Sequence
  Synthetic
uggaggguuucuucgcuca

SEQ ID NO: 459 - RNA, 19 nt, Artificial Sequence
  Synthetic
ggaggguuucuucgcucag

SEQ ID NO: 460 - RNA, 19 nt, Artificial Sequence
  Synthetic
gaggguuucuucgcucagc

SEQ ID NO: 461 - RNA, 19 nt, Artificial Sequence
  Synthetic
aggguuucuucgcucagcc

SEQ ID NO: 462 - RNA, 19 nt, Artificial Sequence
  Synthetic
ggguuucuucgcucagccu

SEQ ID NO: 463 - RNA, 19 nt, Artificial Sequence
  Synthetic
gguuucuucgcucagccuu

SEQ ID NO: 464 - RNA, 19 nt, Artificial Sequence
  Synthetic
guuucuucgcucagccuug

SEQ ID NO: 465 - RNA, 19 nt, Artificial Sequence
  Synthetic
uuucuucgcucagccuugg

SEQ ID NO: 466 - RNA, 19 nt, Artificial Sequence
  Synthetic
uucuucgcucagccuugga

SEQ ID NO: 467 - RNA, 19 nt, Artificial Sequence
  Synthetic
ucuucgcucagccuuggau

SEQ ID NO: 468 - RNA, 19 nt, Artificial Sequence
  Synthetic
cuucgcucagccuuggaug

SEQ ID NO: 469 - RNA, 19 nt, Artificial Sequence
  Synthetic
uucgcucagccuuggaugu

SEQ ID NO: 470 - RNA, 19 nt, Artificial Sequence
  Synthetic
ucgcucagccuuggauguu

SEQ ID NO: 471 - RNA, 19 nt, Artificial Sequence
  Synthetic
gugcaggcggagcaggaga

SEQ ID NO: 472 - RNA, 19 nt, Artificial Sequence
  Synthetic
ugcaggcggagcaggagaa

SEQ ID NO: 473 - RNA, 19 nt, Artificial Sequence
  Synthetic
gcaggcggagcaggagaac

SEQ ID NO: 474 - RNA, 19 nt, Artificial Sequence
  Synthetic
caggcggagcaggagaacg

SEQ ID NO: 475 - RNA, 19 nt, Artificial Sequence
  Synthetic
aggcggagcaggagaacga

SEQ ID NO: 476 - RNA, 19 nt, Artificial Sequence
  Synthetic
ggcggagcaggagaacgac

SEQ ID NO: 477 - RNA, 19 nt, Artificial Sequence
  Synthetic
gcggagcaggagaacgaca

SEQ ID NO: 478 - RNA, 19 nt, Artificial Sequence
  Synthetic
cggagcaggagaacgacac

SEQ ID NO: 479 - RNA, 19 nt, Artificial Sequence
  Synthetic
ggagcaggagaacgacacc

SEQ ID NO: 480 - RNA, 19 nt, Artificial Sequence
  Synthetic
gagcaggagaacgacaccu

SEQ ID NO: 481 - RNA, 19 nt, Artificial Sequence
  Synthetic
agcaggagaacgacaccuc

SEQ ID NO: 482 - RNA, 19 nt, Artificial Sequence
  Synthetic
gcaggagaacgacaccucg

SEQ ID NO: 483 - RNA, 19 nt, Artificial Sequence
  Synthetic
caggagaacgacaccucgg

SEQ ID NO: 484 - RNA, 19 nt, Artificial Sequence
  Synthetic
aggagaacgacaccucggg

SEQ ID NO: 485 - RNA, 19 nt, Artificial Sequence
  Synthetic
ggagaacgacaccucggga

SEQ ID NO: 486 - RNA, 19 nt, Artificial Sequence
  Synthetic
gagaacgacaccucgggau

SEQ ID NO: 487 - RNA, 19 nt, Artificial Sequence
  Synthetic
agaacgacaccucgggaug

SEQ ID NO: 488 - RNA, 19 nt, Artificial Sequence
  Synthetic
gaacgacaccucgggaugg

SEQ ID NO: 489 - RNA, 19 nt, Artificial Sequence
  Synthetic
aacgacaccucgggauggu

SEQ ID NO: 490 - RNA, 19 nt, Artificial Sequence
  Synthetic
gugcaggcggagcaggagc

SEQ ID NO: 491 - RNA, 19 nt, Artificial Sequence
  Synthetic
ugcaggcggagcaggagca

SEQ ID NO: 492 - RNA, 19 nt, Artificial Sequence
  Synthetic
gcaggcggagcaggagcac

SEQ ID NO: 493 - RNA, 19 nt, Artificial Sequence
  Synthetic
caggcggagcaggagcacg

SEQ ID NO: 494 - RNA, 19 nt, Artificial Sequence
  Synthetic
aggcggagcaggagcacga

SEQ ID NO: 495 - RNA, 19 nt, Artificial Sequence
  Synthetic
ggcggagcaggagcacgac

SEQ ID NO: 496 - RNA, 19 nt, Artificial Sequence
  Synthetic
gcggagcaggagcacgaca

SEQ ID NO: 497 - RNA, 19 nt, Artificial Sequence
  Synthetic
cggagcaggagcacgacac

SEQ ID NO: 498 - RNA, 19 nt, Artificial Sequence
  Synthetic
ggagcaggagcacgacacc

SEQ ID NO: 499 - RNA, 19 nt, Artificial Sequence
  Synthetic
gagcaggagcacgacaccu

SEQ ID NO: 500 - RNA, 19 nt, Artificial Sequence
  Synthetic
agcaggagcacgacaccuc

SEQ ID NO: 501 - RNA, 19 nt, Artificial Sequence
  Synthetic
gcaggagcacgacaccucg

SEQ ID NO: 502 - RNA, 19 nt, Artificial Sequence
  Synthetic
caggagcacgacaccucgg

SEQ ID NO: 503 - RNA, 19 nt, Artificial Sequence
  Synthetic
aggagcacgacaccucggg

SEQ ID NO: 504 - RNA, 19 nt, Artificial Sequence
  Synthetic
ggagcacgacaccucggga

SEQ ID NO: 505 - RNA, 19 nt, Artificial Sequence
  Synthetic
gagcacgacaccucgggau

SEQ ID NO: 506 - RNA, 19 nt, Artificial Sequence
  Synthetic
agcacgacaccucgggaug

SEQ ID NO: 507 - RNA, 19 nt, Artificial Sequence
  Synthetic
gcacgacaccucgggaugg

SEQ ID NO: 508 - RNA, 19 nt, Artificial Sequence
  Synthetic
cacgacaccucgggauggu

SEQ ID NO: 509 - RNA, 19 nt, Artificial Sequence
  Synthetic
ucuuuguauuaagaggaac

SEQ ID NO: 510 - RNA, 19 nt, Artificial Sequence
  Synthetic
cuuuguauuaagaggaaca

SEQ ID NO: 511 - RNA, 19 nt, Artificial Sequence
  Synthetic
uuuguauuaagaggaacaa

SEQ ID NO: 512 - RNA, 19 nt, Artificial Sequence
  Synthetic
uuguauuaagaggaacaaa

SEQ ID NO: 513 - RNA, 19 nt, Artificial Sequence
  Synthetic
uguauuaagaggaacaaau

SEQ ID NO: 514 - RNA, 19 nt, Artificial Sequence
  Synthetic
guauuaagaggaacaaaua

SEQ ID NO: 515 - RNA, 19 nt, Artificial Sequence
  Synthetic
uauuaagaggaacaaauaa

SEQ ID NO: 516 - RNA, 19 nt, Artificial Sequence
  Synthetic
auuaagaggaacaaauaaa

SEQ ID NO: 517 - RNA, 19 nt, Artificial Sequence
  Synthetic
uuaagaggaacaaauaaag

SEQ ID NO: 518 - RNA, 19 nt, Artificial Sequence
  Synthetic
uaagaggaacaaauaaagc

SEQ ID NO: 519 - RNA, 19 nt, Artificial Sequence
  Synthetic
aagaggaacaaauaaagcu

SEQ ID NO: 520 - RNA, 19 nt, Artificial Sequence
  Synthetic
agaggaacaaauaaagcug

SEQ ID NO: 521 - RNA, 19 nt, Artificial Sequence
  Synthetic
gaggaacaaauaaagcuga

SEQ ID NO: 522 - RNA, 19 nt, Artificial Sequence
  Synthetic
aggaacaaauaaagcugau

SEQ ID NO: 523 - RNA, 19 nt, Artificial Sequence
  Synthetic
ggaacaaauaaagcugaug

SEQ ID NO: 524 - RNA, 19 nt, Artificial Sequence
  Synthetic
gaacaaauaaagcugaugc

SEQ ID NO: 525 - RNA, 19 nt, Artificial Sequence
  Synthetic
aacaaauaaagcugaugca

SEQ ID NO: 526 - RNA, 19 nt, Artificial Sequence
  Synthetic
acaaauaaagcugaugcag

SEQ ID NO: 527 - RNA, 19 nt, Artificial Sequence
  Synthetic
caaauaaagcugaugcagg

SEQ ID NO: 528 - RNA, 19 nt, Artificial Sequence
  Synthetic
ucuuuguauuaagaggaau

SEQ ID NO: 529 - RNA, 19 nt, Artificial Sequence
  Synthetic
cuuuguauuaagaggaaua

SEQ ID NO: 530 - RNA, 19 nt, Artificial Sequence
  Synthetic
uuuguauuaagaggaauaa

SEQ ID NO: 531 - RNA, 19 nt, Artificial Sequence
  Synthetic
uuguauuaagaggaauaaa

SEQ ID NO: 532 - RNA, 19 nt, Artificial Sequence
  Synthetic
uguauuaagaggaauaaau

SEQ ID NO: 533 - RNA, 19 nt, Artificial Sequence
  Synthetic
guauuaagaggaauaaaua

SEQ ID NO: 534 - RNA, 19 nt, Artificial Sequence
  Synthetic
uauuaagaggaauaaauaa

SEQ ID NO: 535 - RNA, 19 nt, Artificial Sequence
  Synthetic
auuaagaggaauaaauaaa

SEQ ID NO: 536 - RNA, 19 nt, Artificial Sequence
  Synthetic
uuaagaggaauaaauaaag

SEQ ID NO: 537 - RNA, 19 nt, Artificial Sequence
  Synthetic
uaagaggaauaaauaaagc

SEQ ID NO: 538 - RNA, 19 nt, Artificial Sequence
  Synthetic
aagaggaauaaauaaagcu

SEQ ID NO: 539 - RNA, 19 nt, Artificial Sequence
  Synthetic
agaggaauaaauaaagcug

SEQ ID NO: 540 - RNA, 19 nt, Artificial Sequence
  Synthetic
gaggaauaaauaaagcuga

SEQ ID NO: 541 - RNA, 19 nt, Artificial Sequence
  Synthetic
aggaauaaauaaagcugau

SEQ ID NO: 542 - RNA, 19 nt, Artificial Sequence
  Synthetic
ggaauaaauaaagcugaug

SEQ ID NO: 543 - RNA, 19 nt, Artificial Sequence
  Synthetic
gaauaaauaaagcugaugc

SEQ ID NO: 544 - RNA, 19 nt, Artificial Sequence
  Synthetic
aauaaauaaagcugaugca

SEQ ID NO: 545 - RNA, 19 nt, Artificial Sequence
  Synthetic
auaaauaaagcugaugcag

SEQ ID NO: 546 - RNA, 19 nt, Artificial Sequence
  Synthetic
uaaauaaagcugaugcagg

SEQ ID NO: 547 - RNA, 19 nt, Artificial Sequence
  Synthetic
uaagagauggggacaguac

SEQ ID NO: 548 - RNA, 19 nt, Artificial Sequence
  Synthetic
aagagauggggacaguacu

SEQ ID NO: 549 - RNA, 19 nt, Artificial Sequence
  Synthetic
agagauggggacaguacuu

SEQ ID NO: 550 - RNA, 19 nt, Artificial Sequence
  Synthetic
gagauggggacaguacuuc

SEQ ID NO: 551 - RNA, 19 nt, Artificial Sequence
  Synthetic
agauggggacaguacuuca

SEQ ID NO: 552 - RNA, 19 nt, Artificial Sequence
  Synthetic
gauggggacaguacuucaa

SEQ ID NO: 553 - RNA, 19 nt, Artificial Sequence
  Synthetic
auggggacaguacuucaac

SEQ ID NO: 554 - RNA, 19 nt, Artificial Sequence
  Synthetic
uggggacaguacuucaacg

SEQ ID NO: 555 - RNA, 19 nt, Artificial Sequence
  Synthetic
ggggacaguacuucaacgc

SEQ ID NO: 556 - RNA, 19 nt, Artificial Sequence
  Synthetic
gggacaguacuucaacgcu

SEQ ID NO: 557 - RNA, 19 nt, Artificial Sequence
  Synthetic
ggacaguacuucaacgcua

SEQ ID NO: 558 - RNA, 19 nt, Artificial Sequence
  Synthetic
gacaguacuucaacgcuag

SEQ ID NO: 559 - RNA, 19 nt, Artificial Sequence
  Synthetic
acaguacuucaacgcuaga

SEQ ID NO: 560 - RNA, 19 nt, Artificial Sequence
  Synthetic
caguacuucaacgcuagaa

SEQ ID NO: 561 - RNA, 19 nt, Artificial Sequence
  Synthetic
aguacuucaacgcuagaag

SEQ ID NO: 562 - RNA, 19 nt, Artificial Sequence
  Synthetic
guacuucaacgcuagaaga

SEQ ID NO: 563 - RNA, 19 nt, Artificial Sequence
  Synthetic
uacuucaacgcuagaagaa

SEQ ID NO: 564 - RNA, 19 nt, Artificial Sequence
  Synthetic
acuucaacgcuagaagaac

SEQ ID NO: 565 - RNA, 19 nt, Artificial Sequence
  Synthetic
cuucaacgcuagaagaaca

SEQ ID NO: 566 - RNA, 19 nt, Artificial Sequence
  Synthetic
uaagagauggggacaguaa

SEQ ID NO: 567 - RNA, 19 nt, Artificial Sequence
  Synthetic
aagagauggggacaguaau

SEQ ID NO: 568 - RNA, 19 nt, Artificial Sequence
  Synthetic
agagauggggacaguaauu

SEQ ID NO: 569 - RNA, 19 nt, Artificial Sequence
  Synthetic
gagauggggacaguaauuc

SEQ ID NO: 570 - RNA, 19 nt, Artificial Sequence
  Synthetic
agauggggacaguaauuca

SEQ ID NO: 571 - RNA, 19 nt, Artificial Sequence
  Synthetic
gauggggacaguaauucaa

SEQ ID NO: 572 - RNA, 19 nt, Artificial Sequence
  Synthetic
auggggacaguaauucaac

SEQ ID NO: 573 - RNA, 19 nt, Artificial Sequence
  Synthetic
uggggacaguaauucaacg

SEQ ID NO: 574 - RNA, 19 nt, Artificial Sequence
  Synthetic
ggggacaguaauucaacgc

SEQ ID NO: 575 - RNA, 19 nt, Artificial Sequence
  Synthetic
gggacaguaauucaacgcu

SEQ ID NO: 576 - RNA, 19 nt, Artificial Sequence
  Synthetic
ggacaguaauucaacgcua

SEQ ID NO: 577 - RNA, 19 nt, Artificial Sequence
  Synthetic
gacaguaauucaacgcuag

SEQ ID NO: 578 - RNA, 19 nt, Artificial Sequence
  Synthetic
acaguaauucaacgcuaga

SEQ ID NO: 579 - RNA, 19 nt, Artificial Sequence
  Synthetic
caguaauucaacgcuagaa

SEQ ID NO: 580 - RNA, 19 nt, Artificial Sequence
  Synthetic
aguaauucaacgcuagaag

SEQ ID NO: 581 - RNA, 19 nt, Artificial Sequence
  Synthetic
guaauucaacgcuagaaga

SEQ ID NO: 582 - RNA, 19 nt, Artificial Sequence
  Synthetic
uaauucaacgcuagaagaa

SEQ ID NO: 583 - RNA, 19 nt, Artificial Sequence
  Synthetic
aauucaacgcuagaagaac

SEQ ID NO: 584 - RNA, 19 nt, Artificial Sequence
  Synthetic
auucaacgcuagaagaaca

SEQ ID NO: 585 - RNA, 19 nt, Artificial Sequence
  Synthetic
gcccgagcugccugcagag

SEQ ID NO: 586 - RNA, 19 nt, Artificial Sequence
  Synthetic
cccgagcugccugcagagc

SEQ ID NO: 587 - RNA, 19 nt, Artificial Sequence
  Synthetic
ccgagcugccugcagagcc

SEQ ID NO: 588 - RNA, 19 nt, Artificial Sequence
  Synthetic
cgagcugccugcagagccg

SEQ ID NO: 589 - RNA, 19 nt, Artificial Sequence
  Synthetic
gagcugccugcagagccgg

SEQ ID NO: 590 - RNA, 19 nt, Artificial Sequence
  Synthetic
agcugccugcagagccggc

SEQ ID NO: 591 - RNA, 19 nt, Artificial Sequence
  Synthetic
gcugccugcagagccggcg

SEQ ID NO: 592 - RNA, 19 nt, Artificial Sequence
  Synthetic
cugccugcagagccggcgg

SEQ ID NO: 593 - RNA, 19 nt, Artificial Sequence
  Synthetic
ugccugcagagccggcggc

SEQ ID NO: 594 - RNA, 19 nt, Artificial Sequence
  Synthetic
gccugcagagccggcggcc

SEQ ID NO: 595 - RNA, 19 nt, Artificial Sequence
  Synthetic
ccugcagagccggcggccu

SEQ ID NO: 596 - RNA, 19 nt, Artificial Sequence
  Synthetic
cugcagagccggcggccua

SEQ ID NO: 597 - RNA, 19 nt, Artificial Sequence
  Synthetic
ugcagagccggcggccuac

SEQ ID NO: 598 - RNA, 19 nt, Artificial Sequence
  Synthetic
gcagagccggcggccuacu

SEQ ID NO: 599 - RNA, 19 nt, Artificial Sequence
  Synthetic
cagagccggcggccuacug

SEQ ID NO: 600 - RNA, 19 nt, Artificial Sequence
  Synthetic
agagccggcggccuacugg

SEQ ID NO: 601 - RNA, 19 nt, Artificial Sequence
  Synthetic
gagccggcggccuacugga

SEQ ID NO: 602 - RNA, 19 nt, Artificial Sequence
  Synthetic
agccggcggccuacuggag

SEQ ID NO: 603 - RNA, 19 nt, Artificial Sequence
  Synthetic
gccggcggccuacuggagc

SEQ ID NO: 604 - RNA, 19 nt, Artificial Sequence
  Synthetic
gcccgagcugccugcagaa

SEQ ID NO: 605 - RNA, 19 nt, Artificial Sequence
  Synthetic
cccgagcugccugcagaac

SEQ ID NO: 606 - RNA, 19 nt, Artificial Sequence
  Synthetic
ccgagcugccugcagaacc

SEQ ID NO: 607 - RNA, 19 nt, Artificial Sequence
  Synthetic
cgagcugccugcagaaccg

SEQ ID NO: 608 - RNA, 19 nt, Artificial Sequence
  Synthetic
gagcugccugcagaaccgg

SEQ ID NO: 609 - RNA, 19 nt, Artificial Sequence
  Synthetic
agcugccugcagaaccggc

SEQ ID NO: 610 - RNA, 19 nt, Artificial Sequence
  Synthetic
gcugccugcagaaccggcg

SEQ ID NO: 611 - RNA, 19 nt, Artificial Sequence
  Synthetic
cugccugcagaaccggcgg

SEQ ID NO: 612 - RNA, 19 nt, Artificial Sequence
  Synthetic
ugccugcagaaccggcggc

SEQ ID NO: 613 - RNA, 19 nt, Artificial Sequence
  Synthetic
gccugcagaaccggcggcc

SEQ ID NO: 614 - RNA, 19 nt, Artificial Sequence
  Synthetic
ccugcagaaccggcggccu

SEQ ID NO: 615 - RNA, 19 nt, Artificial Sequence
  Synthetic
cugcagaaccggcggccua

SEQ ID NO: 616 - RNA, 19 nt, Artificial Sequence
  Synthetic
ugcagaaccggcggccuac

SEQ ID NO: 617 - RNA, 19 nt, Artificial Sequence
  Synthetic
gcagaaccggcggccuacu

SEQ ID NO: 618 - RNA, 19 nt, Artificial Sequence
  Synthetic
cagaaccggcggccuacug

SEQ ID NO: 619 - RNA, 19 nt, Artificial Sequence
  Synthetic
agaaccggcggccuacugg

SEQ ID NO: 620 - RNA, 19 nt, Artificial Sequence
  Synthetic
gaaccggcggccuacugga

SEQ ID NO: 621 - RNA, 19 nt, Artificial Sequence
  Synthetic
aaccggcggccuacuggag

SEQ ID NO: 622 - RNA, 19 nt, Artificial Sequence
  Synthetic
accggcggccuacuggagc

SEQ ID NO: 623 - RNA, 19 nt, Artificial Sequence
  Synthetic
cacgccugcucccucaucu

SEQ ID NO: 624 - RNA, 19 nt, Artificial Sequence
  Synthetic
acgccugcucccucaucua

SEQ ID NO: 625 - RNA, 19 nt, Artificial Sequence
  Synthetic
cgccugcucccucaucuac

SEQ ID NO: 626 - RNA, 19 nt, Artificial Sequence
  Synthetic
gccugcucccucaucuacu

SEQ ID NO: 627 - RNA, 19 nt, Artificial Sequence
  Synthetic
ccugcucccucaucuacug

SEQ ID NO: 628 - RNA, 19 nt, Artificial Sequence
  Synthetic
cugcucccucaucuacugu

SEQ ID NO: 629 - RNA, 19 nt, Artificial Sequence
  Synthetic
ugcucccucaucuacugug

SEQ ID NO: 630 - RNA, 19 nt, Artificial Sequence
  Synthetic
gcucccucaucuacugugu

SEQ ID NO: 631 - RNA, 19 nt, Artificial Sequence
  Synthetic
cucccucaucuacugugug

SEQ ID NO: 632 - RNA, 19 nt, Artificial Sequence
  Synthetic
ucccucaucuacugugugc

SEQ ID NO: 633 - RNA, 19 nt, Artificial Sequence
  Synthetic
cccucaucuacugugugca

SEQ ID NO: 634 - RNA, 19 nt, Artificial Sequence
  Synthetic
ccucaucuacugugugcac

SEQ ID NO: 635 - RNA, 19 nt, Artificial Sequence
  Synthetic
cucaucuacugugugcacu

SEQ ID NO: 636 - RNA, 19 nt, Artificial Sequence
  Synthetic
ucaucuacugugugcacuu

SEQ ID NO: 637 - RNA, 19 nt, Artificial Sequence
  Synthetic
caucuacugugugcacuuc

SEQ ID NO: 638 - RNA, 19 nt, Artificial Sequence
  Synthetic
aucuacugugugcacuuca

SEQ ID NO: 639 - RNA, 19 nt, Artificial Sequence
  Synthetic
ucuacugugugcacuucau

SEQ ID NO: 640 - RNA, 19 nt, Artificial Sequence
  Synthetic
cuacugugugcacuucauc

SEQ ID NO: 641 - RNA, 19 nt, Artificial Sequence
  Synthetic
uacugugugcacuucaucc

SEQ ID NO: 642 - RNA, 19 nt, Artificial Sequence
  Synthetic
cacgccugcucccucaucc

SEQ ID NO: 643 - RNA, 19 nt, Artificial Sequence
  Synthetic
acgccugcucccucaucca

SEQ ID NO: 644 - RNA, 19 nt, Artificial Sequence
  Synthetic
cgccugcucccucauccac

SEQ ID NO: 645 - RNA, 19 nt, Artificial Sequence
  Synthetic
gccugcucccucauccacu

SEQ ID NO: 646 - RNA, 19 nt, Artificial Sequence
  Synthetic
ccugcucccucauccacug

SEQ ID NO: 647 - RNA, 19 nt, Artificial Sequence
  Synthetic
cugcucccucauccacugu

SEQ ID NO: 648 - RNA, 19 nt, Artificial Sequence
  Synthetic
ugcucccucauccacugug

SEQ ID NO: 649 - RNA, 19 nt, Artificial Sequence
  Synthetic
gcucccucauccacugugu

SEQ ID NO: 650 - RNA, 19 nt, Artificial Sequence
  Synthetic
cucccucauccacugugug

SEQ ID NO: 651 - RNA, 19 nt, Artificial Sequence
  Synthetic
ucccucauccacugugugc

SEQ ID NO: 652 - RNA, 19 nt, Artificial Sequence
  Synthetic
cccucauccacugugugca

SEQ ID NO: 653 - RNA, 19 nt, Artificial Sequence
  Synthetic
ccucauccacugugugcac

SEQ ID NO: 654 - RNA, 19 nt, Artificial Sequence
  Synthetic
cucauccacugugugcacu

SEQ ID NO: 655 - RNA, 19 nt, Artificial Sequence
  Synthetic
ucauccacugugugcacuu

SEQ ID NO: 656 - RNA, 19 nt, Artificial Sequence
  Synthetic
cauccacugugugcacuuc

SEQ ID NO: 657 - RNA, 19 nt, Artificial Sequence
  Synthetic
auccacugugugcacuuca

SEQ ID NO: 658 - RNA, 19 nt, Artificial Sequence
  Synthetic
uccacugugugcacuucau

SEQ ID NO: 659 - RNA, 19 nt, Artificial Sequence
  Synthetic
ccacugugugcacuucauc

SEQ ID NO: 660 - RNA, 19 nt, Artificial Sequence
  Synthetic
cacugugugcacuucaucc

SEQ ID NO: 661 - RNA, 19 nt, Artificial Sequence
  Synthetic
aaacacacagaauccuaag

SEQ ID NO: 662 - RNA, 19 nt, Artificial Sequence
  Synthetic
aacacacagaauccuaagu

SEQ ID NO: 663 - RNA, 19 nt, Artificial Sequence
  Synthetic
acacacagaauccuaagua

SEQ ID NO: 664 - RNA, 19 nt, Artificial Sequence
  Synthetic
cacacagaauccuaaguau

SEQ ID NO: 665 - RNA, 19 nt, Artificial Sequence
  Synthetic
acacagaauccuaaguaua

SEQ ID NO: 666 - RNA, 19 nt, Artificial Sequence
  Synthetic
cacagaauccuaaguauau

SEQ ID NO: 667 - RNA, 19 nt, Artificial Sequence
  Synthetic
acagaauccuaaguauauc

SEQ ID NO: 668 - RNA, 19 nt, Artificial Sequence
  Synthetic
cagaauccuaaguauauca

SEQ ID NO: 669 - RNA, 19 nt, Artificial Sequence
  Synthetic
agaauccuaaguauaucac

SEQ ID NO: 670 - RNA, 19 nt, Artificial Sequence
  Synthetic
gaauccuaaguauaucacu

SEQ ID NO: 671 - RNA, 19 nt, Artificial Sequence
  Synthetic
aauccuaaguauaucacug

SEQ ID NO: 672 - RNA, 19 nt, Artificial Sequence
  Synthetic
auccuaaguauaucacugc

SEQ ID NO: 673 - RNA, 19 nt, Artificial Sequence
  Synthetic
uccuaaguauaucacugca

SEQ ID NO: 674 - RNA, 19 nt, Artificial Sequence
  Synthetic
ccuaaguauaucacugcag

SEQ ID NO: 675 - RNA, 19 nt, Artificial Sequence
  Synthetic
cuaaguauaucacugcagc

SEQ ID NO: 676 - RNA, 19 nt, Artificial Sequence
  Synthetic
uaaguauaucacugcagcc

SEQ ID NO: 677 - RNA, 19 nt, Artificial Sequence
  Synthetic
aaguauaucacugcagccu

SEQ ID NO: 678 - RNA, 19 nt, Artificial Sequence
  Synthetic
aguauaucacugcagccug

SEQ ID NO: 679 - RNA, 19 nt, Artificial Sequence
  Synthetic
guauaucacugcagccugu

SEQ ID NO: 680 - RNA, 19 nt, Artificial Sequence
  Synthetic
aaacacacagaauccuaaa

SEQ ID NO: 681 - RNA, 19 nt, Artificial Sequence
  Synthetic
aacacacagaauccuaaau

SEQ ID NO: 682 - RNA, 19 nt, Artificial Sequence
  Synthetic
acacacagaauccuaaaua

SEQ ID NO: 683 - RNA, 19 nt, Artificial Sequence
  Synthetic
cacacagaauccuaaauau

SEQ ID NO: 684 - RNA, 19 nt, Artificial Sequence
  Synthetic
acacagaauccuaaauaua

SEQ ID NO: 685 - RNA, 19 nt, Artificial Sequence
  Synthetic
cacagaauccuaaauauau

SEQ ID NO: 686 - RNA, 19 nt, Artificial Sequence
  Synthetic
acagaauccuaaauauauc

SEQ ID NO: 687 - RNA, 19 nt, Artificial Sequence
  Synthetic
cagaauccuaaauauauca

SEQ ID NO: 688 - RNA, 19 nt, Artificial Sequence
  Synthetic
agaauccuaaauauaucac

SEQ ID NO: 689 - RNA, 19 nt, Artificial Sequence
  Synthetic
gaauccuaaauauaucacu

SEQ ID NO: 690 - RNA, 19 nt, Artificial Sequence
  Synthetic
aauccuaaauauaucacug

SEQ ID NO: 691 - RNA, 19 nt, Artificial Sequence
  Synthetic
auccuaaauauaucacugc

SEQ ID NO: 692 - RNA, 19 nt, Artificial Sequence
  Synthetic
uccuaaauauaucacugca

SEQ ID NO: 693 - RNA, 19 nt, Artificial Sequence
  Synthetic
ccuaaauauaucacugcag

SEQ ID NO: 694 - RNA, 19 nt, Artificial Sequence
  Synthetic
cuaaauauaucacugcagc

SEQ ID NO: 695 - RNA, 19 nt, Artificial Sequence
  Synthetic
uaaauauaucacugcagcc

SEQ ID NO: 696 - RNA, 19 nt, Artificial Sequence
  Synthetic
aaauauaucacugcagccu

SEQ ID NO: 697 - RNA, 19 nt, Artificial Sequence
  Synthetic
aauauaucacugcagccug

SEQ ID NO: 698 - RNA, 19 nt, Artificial Sequence
  Synthetic
auauaucacugcagccugu

SEQ ID NO: 699 - RNA, 19 nt, Artificial Sequence
  Synthetic
guuucucacgccauugcuc

SEQ ID NO: 700 - RNA, 19 nt, Artificial Sequence
  Synthetic
uuucucacgccauugcuca

SEQ ID NO: 701 - RNA, 19 nt, Artificial Sequence
  Synthetic
uucucacgccauugcucag

SEQ ID NO: 702 - RNA, 19 nt, Artificial Sequence
  Synthetic
ucucacgccauugcucagg

SEQ ID NO: 703 - RNA, 19 nt, Artificial Sequence
  Synthetic
cucacgccauugcucagga

SEQ ID NO: 704 - RNA, 19 nt, Artificial Sequence
  Synthetic
ucacgccauugcucaggaa

SEQ ID NO: 705 - RNA, 19 nt, Artificial Sequence
  Synthetic
cacgccauugcucaggaac

SEQ ID NO: 706 - RNA, 19 nt, Artificial Sequence
  Synthetic
acgccauugcucaggaaca

SEQ ID NO: 707 - RNA, 19 nt, Artificial Sequence
  Synthetic
cgccauugcucaggaacau

SEQ ID NO: 708 - RNA, 19 nt, Artificial Sequence
  Synthetic
gccauugcucaggaacauc

SEQ ID NO: 709 - RNA, 19 nt, Artificial Sequence
  Synthetic
ccauugcucaggaacauca

SEQ ID NO: 710 - RNA, 19 nt, Artificial Sequence
  Synthetic
cauugcucaggaacaucau

SEQ ID NO: 711 - RNA, 19 nt, Artificial Sequence
  Synthetic
auugcucaggaacaucauc

SEQ ID NO: 712 - RNA, 19 nt, Artificial Sequence
  Synthetic
uugcucaggaacaucauca

SEQ ID NO: 713 - RNA, 19 nt, Artificial Sequence
  Synthetic
ugcucaggaacaucaucau

SEQ ID NO: 714 - RNA, 19 nt, Artificial Sequence
  Synthetic
gcucaggaacaucaucauc

SEQ ID NO: 715 - RNA, 19 nt, Artificial Sequence
  Synthetic
cucaggaacaucaucauca

SEQ ID NO: 716 - RNA, 19 nt, Artificial Sequence
  Synthetic
ucaggaacaucaucaucag

SEQ ID NO: 717 - RNA, 19 nt, Artificial Sequence
  Synthetic
caggaacaucaucaucagc

SEQ ID NO: 718 - RNA, 19 nt, Artificial Sequence
  Synthetic
guuucucacgccauugcua

SEQ ID NO: 719 - RNA, 19 nt, Artificial Sequence
  Synthetic
uuucucacgccauugcuaa

SEQ ID NO: 720 - RNA, 19 nt, Artificial Sequence
  Synthetic
uucucacgccauugcuaag

SEQ ID NO: 721 - RNA, 19 nt, Artificial Sequence
  Synthetic
ucucacgccauugcuaagg

SEQ ID NO: 722 - RNA, 19 nt, Artificial Sequence
  Synthetic
cucacgccauugcuaagga

SEQ ID NO: 723 - RNA, 19 nt, Artificial Sequence
  Synthetic
ucacgccauugcuaaggaa

SEQ ID NO: 724 - RNA, 19 nt, Artificial Sequence
  Synthetic
cacgccauugcuaaggaac

SEQ ID NO: 725 - RNA, 19 nt, Artificial Sequence
  Synthetic
acgccauugcuaaggaaca

SEQ ID NO: 726 - RNA, 19 nt, Artificial Sequence
  Synthetic
cgccauugcuaaggaacau

SEQ ID NO: 727 - RNA, 19 nt, Artificial Sequence
  Synthetic
gccauugcuaaggaacauc

SEQ ID NO: 728 - RNA, 19 nt, Artificial Sequence
  Synthetic
ccauugcuaaggaacauca

SEQ ID NO: 729 - RNA, 19 nt, Artificial Sequence
  Synthetic
cauugcuaaggaacaucau

SEQ ID NO: 730 - RNA, 19 nt, Artificial Sequence
  Synthetic
auugcuaaggaacaucauc

SEQ ID NO: 731 - RNA, 19 nt, Artificial Sequence
  Synthetic
uugcuaaggaacaucauca

SEQ ID NO: 732 - RNA, 19 nt, Artificial Sequence
  Synthetic
ugcuaaggaacaucaucau

SEQ ID NO: 733 - RNA, 19 nt, Artificial Sequence
  Synthetic
gcuaaggaacaucaucauc

SEQ ID NO: 734 - RNA, 19 nt, Artificial Sequence
  Synthetic
cuaaggaacaucaucauca

SEQ ID NO: 735 - RNA, 19 nt, Artificial Sequence
  Synthetic
uaaggaacaucaucaucag

SEQ ID NO: 736 - RNA, 19 nt, Artificial Sequence
  Synthetic
aaggaacaucaucaucagc

SEQ ID NO: 737 - RNA, 19 nt, Artificial Sequence
  Synthetic
guucaucuaccgcaucaac

SEQ ID NO: 738 - RNA, 19 nt, Artificial Sequence
  Synthetic
uucaucuaccgcaucaaca

SEQ ID NO: 739 - RNA, 19 nt, Artificial Sequence
  Synthetic
ucaucuaccgcaucaacac

SEQ ID NO: 740 - RNA, 19 nt, Artificial Sequence
  Synthetic
caucuaccgcaucaacaca

SEQ ID NO: 741 - RNA, 19 nt, Artificial Sequence
  Synthetic
aucuaccgcaucaacacac

SEQ ID NO: 742 - RNA, 19 nt, Artificial Sequence
  Synthetic
ucuaccgcaucaacacacu

SEQ ID NO: 743 - RNA, 19 nt, Artificial Sequence
  Synthetic
cuaccgcaucaacacacua

SEQ ID NO: 744 - RNA, 19 nt, Artificial Sequence
  Synthetic
uaccgcaucaacacacuag

SEQ ID NO: 745 - RNA, 19 nt, Artificial Sequence
  Synthetic
accgcaucaacacacuagg

SEQ ID NO: 746 - RNA, 19 nt, Artificial Sequence
  Synthetic
ccgcaucaacacacuaggc

SEQ ID NO: 747 - RNA, 19 nt, Artificial Sequence
  Synthetic
cgcaucaacacacuaggcu

SEQ ID NO: 748 - RNA, 19 nt, Artificial Sequence
  Synthetic
gcaucaacacacuaggcug

SEQ ID NO: 749 - RNA, 19 nt, Artificial Sequence
  Synthetic
caucaacacacuaggcugg

SEQ ID NO: 750 - RNA, 19 nt, Artificial Sequence
  Synthetic
aucaacacacuaggcugga

SEQ ID NO: 751 - RNA, 19 nt, Artificial Sequence
  Synthetic
ucaacacacuaggcuggac

SEQ ID NO: 752 - RNA, 19 nt, Artificial Sequence
  Synthetic
caacacacuaggcuggacc

SEQ ID NO: 753 - RNA, 19 nt, Artificial Sequence
  Synthetic
aacacacuaggcuggacca

SEQ ID NO: 754 - RNA, 19 nt, Artificial Sequence
  Synthetic
acacacuaggcuggaccag

SEQ ID NO: 755 - RNA, 19 nt, Artificial Sequence
  Synthetic
cacacuaggcuggaccagu

SEQ ID NO: 756 - RNA, 19 nt, Artificial Sequence
  Synthetic
guucaucuaccgcaucaau

SEQ ID NO: 757 - RNA, 19 nt, Artificial Sequence
  Synthetic
uucaucuaccgcaucaaua

SEQ ID NO: 758 - RNA, 19 nt, Artificial Sequence
  Synthetic
ucaucuaccgcaucaauac

SEQ ID NO: 759 - RNA, 19 nt, Artificial Sequence
  Synthetic
caucuaccgcaucaauaca

SEQ ID NO: 760 - RNA, 19 nt, Artificial Sequence
  Synthetic
aucuaccgcaucaauacac

SEQ ID NO: 761 - RNA, 19 nt, Artificial Sequence
  Synthetic
ucuaccgcaucaauacacu

SEQ ID NO: 762 - RNA, 19 nt, Artificial Sequence
  Synthetic
cuaccgcaucaauacacua

SEQ ID NO: 763 - RNA, 19 nt, Artificial Sequence
  Synthetic
uaccgcaucaauacacuag

SEQ ID NO: 764 - RNA, 19 nt, Artificial Sequence
  Synthetic
accgcaucaauacacuagg

SEQ ID NO: 765 - RNA, 19 nt, Artificial Sequence
  Synthetic
ccgcaucaauacacuaggc

SEQ ID NO: 766 - RNA, 19 nt, Artificial Sequence
  Synthetic
cgcaucaauacacuaggcu

SEQ ID NO: 767 - RNA, 19 nt, Artificial Sequence
  Synthetic
gcaucaauacacuaggcug

SEQ ID NO: 768 - RNA, 19 nt, Artificial Sequence
  Synthetic
caucaauacacuaggcugg

SEQ ID NO: 769 - RNA, 19 nt, Artificial Sequence
  Synthetic
aucaauacacuaggcugga

SEQ ID NO: 770 - RNA, 19 nt, Artificial Sequence
  Synthetic
ucaauacacuaggcuggac

SEQ ID NO: 771 - RNA, 19 nt, Artificial Sequence
  Synthetic
caauacacuaggcuggacc

SEQ ID NO: 772 - RNA, 19 nt, Artificial Sequence
  Synthetic
aauacacuaggcuggacca

SEQ ID NO: 773 - RNA, 19 nt, Artificial Sequence
  Synthetic
auacacuaggcuggaccag

SEQ ID NO: 774 - RNA, 19 nt, Artificial Sequence
  Synthetic
uacacuaggcuggaccagu

SEQ ID NO: 775 - RNA, 19 nt, Artificial Sequence
  Synthetic
cuugguguccuggugacgc

SEQ ID NO: 776 - RNA, 19 nt, Artificial Sequence
  Synthetic
uugguguccuggugacgca

SEQ ID NO: 777 - RNA, 19 nt, Artificial Sequence
  Synthetic
ugguguccuggugacgcag

SEQ ID NO: 778 - RNA, 19 nt, Artificial Sequence
  Synthetic
gguguccuggugacgcagc

SEQ ID NO: 779 - RNA, 19 nt, Artificial Sequence
  Synthetic
guguccuggugacgcagcc

SEQ ID NO: 780 - RNA, 19 nt, Artificial Sequence
  Synthetic
uguccuggugacgcagccc

SEQ ID NO: 781 - RNA, 19 nt, Artificial Sequence
  Synthetic
guccuggugacgcagcccc

SEQ ID NO: 782 - RNA, 19 nt, Artificial Sequence
  Synthetic
uccuggugacgcagccccu

SEQ ID NO: 783 - RNA, 19 nt, Artificial Sequence
  Synthetic
ccuggugacgcagccccuc

SEQ ID NO: 784 - RNA, 19 nt, Artificial Sequence
  Synthetic
cuggugacgcagccccucg

SEQ ID NO: 785 - RNA, 19 nt, Artificial Sequence
  Synthetic
uggugacgcagccccucgu

SEQ ID NO: 786 - RNA, 19 nt, Artificial Sequence
  Synthetic
ggugacgcagccccucgug

SEQ ID NO: 787 - RNA, 19 nt, Artificial Sequence
  Synthetic
gugacgcagccccucguga

SEQ ID NO: 788 - RNA, 19 nt, Artificial Sequence
  Synthetic
ugacgcagccccucgugau

SEQ ID NO: 789 - RNA, 19 nt, Artificial Sequence
  Synthetic
gacgcagccccucgugaug

SEQ ID NO: 790 - RNA, 19 nt, Artificial Sequence
  Synthetic
acgcagccccucgugaugg

SEQ ID NO: 791 - RNA, 19 nt, Artificial Sequence
  Synthetic
cgcagccccucgugaugga

SEQ ID NO: 792 - RNA, 19 nt, Artificial Sequence
  Synthetic
gcagccccucgugauggag

SEQ ID NO: 793 - RNA, 19 nt, Artificial Sequence
  Synthetic
cagccccucgugauggagc

SEQ ID NO: 794 - RNA, 19 nt, Artificial Sequence
  Synthetic
cuugguguccuggugacgu

SEQ ID NO: 795 - RNA, 19 nt, Artificial Sequence
  Synthetic
uugguguccuggugacgua

SEQ ID NO: 796 - RNA, 19 nt, Artificial Sequence
  Synthetic
ugguguccuggugacguag

SEQ ID NO: 797 - RNA, 19 nt, Artificial Sequence
  Synthetic
gguguccuggugacguagc

SEQ ID NO: 798 - RNA, 19 nt, Artificial Sequence
  Synthetic
guguccuggugacguagcc

SEQ ID NO: 799 - RNA, 19 nt, Artificial Sequence
  Synthetic
uguccuggugacguagccc

SEQ ID NO: 800 - RNA, 19 nt, Artificial Sequence
  Synthetic
guccuggugacguagcccc

SEQ ID NO: 801 - RNA, 19 nt, Artificial Sequence
  Synthetic
uccuggugacguagccccu

SEQ ID NO: 802 - RNA, 19 nt, Artificial Sequence
  Synthetic
ccuggugacguagccccuc

SEQ ID NO: 803 - RNA, 19 nt, Artificial Sequence
  Synthetic
cuggugacguagccccucg

SEQ ID NO: 804 - RNA, 19 nt, Artificial Sequence
  Synthetic
uggugacguagccccucgu

SEQ ID NO: 805 - RNA, 19 nt, Artificial Sequence
  Synthetic
ggugacguagccccucgug

SEQ ID NO: 806 - RNA, 19 nt, Artificial Sequence
  Synthetic
gugacguagccccucguga

SEQ ID NO: 807 - RNA, 19 nt, Artificial Sequence
  Synthetic
ugacguagccccucgugau

SEQ ID NO: 808 - RNA, 19 nt, Artificial Sequence
  Synthetic
gacguagccccucgugaug

SEQ ID NO: 809 - RNA, 19 nt, Artificial Sequence
  Synthetic
acguagccccucgugaugg

SEQ ID NO: 810 - RNA, 19 nt, Artificial Sequence
  Synthetic
cguagccccucgugaugga

SEQ ID NO: 811 - RNA, 19 nt, Artificial Sequence
  Synthetic
guagccccucgugauggag

SEQ ID NO: 812 - RNA, 19 nt, Artificial Sequence
  Synthetic
uagccccucgugauggagc

SEQ ID NO: 813 - RNA, 19 nt, Artificial Sequence
  Synthetic
caggccaucaccucacugg

SEQ ID NO: 814 - RNA, 19 nt, Artificial Sequence
  Synthetic
aggccaucaccucacuggu

SEQ ID NO: 815 - RNA, 19 nt, Artificial Sequence
  Synthetic
ggccaucaccucacuggug

SEQ ID NO: 816 - RNA, 19 nt, Artificial Sequence
  Synthetic
gccaucaccucacuggugc

SEQ ID NO: 817 - RNA, 19 nt, Artificial Sequence
  Synthetic
ccaucaccucacuggugcu

SEQ ID NO: 818 - RNA, 19 nt, Artificial Sequence
  Synthetic
caucaccucacuggugcuc

SEQ ID NO: 819 - RNA, 19 nt, Artificial Sequence
  Synthetic
aucaccucacuggugcuca

SEQ ID NO: 820 - RNA, 19 nt, Artificial Sequence
  Synthetic
ucaccucacuggugcucag

SEQ ID NO: 821 - RNA, 19 nt, Artificial Sequence
  Synthetic
caccucacuggugcucagu

SEQ ID NO: 822 - RNA, 19 nt, Artificial Sequence
  Synthetic
accucacuggugcucagug

SEQ ID NO: 823 - RNA, 19 nt, Artificial Sequence
  Synthetic
ccucacuggugcucagugc

SEQ ID NO: 824 - RNA, 19 nt, Artificial Sequence
  Synthetic
cucacuggugcucagugca

SEQ ID NO: 825 - RNA, 19 nt, Artificial Sequence
  Synthetic
ucacuggugcucagugcaa

SEQ ID NO: 826 - RNA, 19 nt, Artificial Sequence
  Synthetic
cacuggugcucagugcaau

SEQ ID NO: 827 - RNA, 19 nt, Artificial Sequence
  Synthetic
acuggugcucagugcaaug

SEQ ID NO: 828 - RNA, 19 nt, Artificial Sequence
  Synthetic
cuggugcucagugcaauga

SEQ ID NO: 829 - RNA, 19 nt, Artificial Sequence
  Synthetic
uggugcucagugcaaugac

SEQ ID NO: 830 - RNA, 19 nt, Artificial Sequence
  Synthetic
ggugcucagugcaaugacu

SEQ ID NO: 831 - RNA, 19 nt, Artificial Sequence
  Synthetic
gugcucagugcaaugacug

SEQ ID NO: 832 - RNA, 19 nt, Artificial Sequence
  Synthetic
caggccaucaccucacugc

SEQ ID NO: 833 - RNA, 19 nt, Artificial Sequence
  Synthetic
aggccaucaccucacugcu

SEQ ID NO: 834 - RNA, 19 nt, Artificial Sequence
  Synthetic
ggccaucaccucacugcug

SEQ ID NO: 835 - RNA, 19 nt, Artificial Sequence
  Synthetic
gccaucaccucacugcugc

SEQ ID NO: 836 - RNA, 19 nt, Artificial Sequence
  Synthetic
ccaucaccucacugcugcu

SEQ ID NO: 837 - RNA, 19 nt, Artificial Sequence
  Synthetic
caucaccucacugcugcuc

SEQ ID NO: 838 - RNA, 19 nt, Artificial Sequence
  Synthetic
aucaccucacugcugcuca

SEQ ID NO: 839 - RNA, 19 nt, Artificial Sequence
  Synthetic
ucaccucacugcugcucag

SEQ ID NO: 840 - RNA, 19 nt, Artificial Sequence
  Synthetic
caccucacugcugcucagu

SEQ ID NO: 841 - RNA, 19 nt, Artificial Sequence
  Synthetic
accucacugcugcucagug

SEQ ID NO: 842 - RNA, 19 nt, Artificial Sequence
  Synthetic
ccucacugcugcucagugc

SEQ ID NO: 843 - RNA, 19 nt, Artificial Sequence
  Synthetic
cucacugcugcucagugca

SEQ ID NO: 844 - RNA, 19 nt, Artificial Sequence
  Synthetic
ucacugcugcucagugcaa

SEQ ID NO: 845 - RNA, 19 nt, Artificial Sequence
  Synthetic
cacugcugcucagugcaau

SEQ ID NO: 846 - RNA, 19 nt, Artificial Sequence
  Synthetic
acugcugcucagugcaaug

SEQ ID NO: 847 - RNA, 19 nt, Artificial Sequence
  Synthetic
cugcugcucagugcaauga

SEQ ID NO: 848 - RNA, 19 nt, Artificial Sequence
  Synthetic
ugcugcucagugcaaugac

SEQ ID NO: 849 - RNA, 19 nt, Artificial Sequence
  Synthetic
gcugcucagugcaaugacu

SEQ ID NO: 850 - RNA, 19 nt, Artificial Sequence
  Synthetic
cugcucagugcaaugacug

SEQ ID NO: 851 - RNA, 19 nt, Artificial Sequence
  Synthetic
ccacgagaagcugcugcua

SEQ ID NO: 852 - RNA, 19 nt, Artificial Sequence
  Synthetic
cacgagaagcugcugcuac

SEQ ID NO: 853 - RNA, 19 nt, Artificial Sequence
  Synthetic
acgagaagcugcugcuaca

SEQ ID NO: 854 - RNA, 19 nt, Artificial Sequence
  Synthetic
cgagaagcugcugcuacag

SEQ ID NO: 855 - RNA, 19 nt, Artificial Sequence
  Synthetic
gagaagcugcugcuacaga

SEQ ID NO: 856 - RNA, 19 nt, Artificial Sequence
  Synthetic
agaagcugcugcuacagau

SEQ ID NO: 857 - RNA, 19 nt, Artificial Sequence
  Synthetic
gaagcugcugcuacagauc

SEQ ID NO: 858 - RNA, 19 nt, Artificial Sequence
  Synthetic
aagcugcugcuacagauca

SEQ ID NO: 859 - RNA, 19 nt, Artificial Sequence
  Synthetic
agcugcugcuacagaucaa

SEQ ID NO: 860 - RNA, 19 nt, Artificial Sequence
  Synthetic
gcugcugcuacagaucaac

SEQ ID NO: 861 - RNA, 19 nt, Artificial Sequence
  Synthetic
cugcugcuacagaucaacc

SEQ ID NO: 862 - RNA, 19 nt, Artificial Sequence
  Synthetic
ugcugcuacagaucaaccc

SEQ ID NO: 863 - RNA, 19 nt, Artificial Sequence
  Synthetic
gcugcuacagaucaacccc

SEQ ID NO: 864 - RNA, 19 nt, Artificial Sequence
  Synthetic
cugcuacagaucaaccccg

SEQ ID NO: 865 - RNA, 19 nt, Artificial Sequence
  Synthetic
ugcuacagaucaaccccga

SEQ ID NO: 866 - RNA, 19 nt, Artificial Sequence
  Synthetic
gcuacagaucaaccccgag

SEQ ID NO: 867 - RNA, 19 nt, Artificial Sequence
  Synthetic
cuacagaucaaccccgagc

SEQ ID NO: 868 - RNA, 19 nt, Artificial Sequence
  Synthetic
uacagaucaaccccgagcg

SEQ ID NO: 869 - RNA, 19 nt, Artificial Sequence
  Synthetic
acagaucaaccccgagcgg

SEQ ID NO: 870 - RNA, 19 nt, Artificial Sequence
  Synthetic
ccacgagaagcugcugcug

SEQ ID NO: 871 - RNA, 19 nt, Artificial Sequence
  Synthetic
cacgagaagcugcugcugc

SEQ ID NO: 872 - RNA, 19 nt, Artificial Sequence
  Synthetic
acgagaagcugcugcugca

SEQ ID NO: 873 - RNA, 19 nt, Artificial Sequence
  Synthetic
cgagaagcugcugcugcag

SEQ ID NO: 874 - RNA, 19 nt, Artificial Sequence
  Synthetic
gagaagcugcugcugcaga

SEQ ID NO: 875 - RNA, 19 nt, Artificial Sequence
  Synthetic
agaagcugcugcugcagau

SEQ ID NO: 876 - RNA, 19 nt, Artificial Sequence
  Synthetic
gaagcugcugcugcagauc

SEQ ID NO: 877 - RNA, 19 nt, Artificial Sequence
  Synthetic
aagcugcugcugcagauca

SEQ ID NO: 878 - RNA, 19 nt, Artificial Sequence
  Synthetic
agcugcugcugcagaucaa

SEQ ID NO: 879 - RNA, 19 nt, Artificial Sequence
  Synthetic
gcugcugcugcagaucaac

SEQ ID NO: 880 - RNA, 19 nt, Artificial Sequence
  Synthetic
cugcugcugcagaucaacc

SEQ ID NO: 881 - RNA, 19 nt, Artificial Sequence
  Synthetic
ugcugcugcagaucaaccc

SEQ ID NO: 882 - RNA, 19 nt, Artificial Sequence
  Synthetic
gcugcugcagaucaacccc

SEQ ID NO: 883 - RNA, 19 nt, Artificial Sequence
  Synthetic
cugcugcagaucaaccccg

SEQ ID NO: 884 - RNA, 19 nt, Artificial Sequence
  Synthetic
ugcugcagaucaaccccga

SEQ ID NO: 885 - RNA, 19 nt, Artificial Sequence
  Synthetic
gcugcagaucaaccccgag

SEQ ID NO: 886 - RNA, 19 nt, Artificial Sequence
  Synthetic
cugcagaucaaccccgagc

SEQ ID NO: 887 - RNA, 19 nt, Artificial Sequence
  Synthetic
ugcagaucaaccccgagcg

SEQ ID NO: 888 - RNA, 19 nt, Artificial Sequence
  Synthetic
gcagaucaaccccgagcgg

SEQ ID NO: 889 - RNA, 19 nt, Artificial Sequence
  Synthetic
acgaggaagaggaggagga

SEQ ID NO: 890 - RNA, 19 nt, Artificial Sequence
  Synthetic
cgaggaagaggaggaggag

SEQ ID NO: 891 - RNA, 19 nt, Artificial Sequence
  Synthetic
gaggaagaggaggaggagg

SEQ ID NO: 892 - RNA, 19 nt, Artificial Sequence
  Synthetic
aggaagaggaggaggaggc

SEQ ID NO: 893 - RNA, 19 nt, Artificial Sequence
  Synthetic
ggaagaggaggaggaggcc

SEQ ID NO: 894 - RNA, 19 nt, Artificial Sequence
  Synthetic
gaagaggaggaggaggccg

SEQ ID NO: 895 - RNA, 19 nt, Artificial Sequence
  Synthetic
aagaggaggaggaggccga

SEQ ID NO: 896 - RNA, 19 nt, Artificial Sequence
  Synthetic
agaggaggaggaggccgac

SEQ ID NO: 897 - RNA, 19 nt, Artificial Sequence
  Synthetic
gaggaggaggaggccgacg

SEQ ID NO: 898 - RNA, 19 nt, Artificial Sequence
  Synthetic
aggaggaggaggccgacgc

SEQ ID NO: 899 - RNA, 19 nt, Artificial Sequence
  Synthetic
ggaggaggaggccgacgcc

SEQ ID NO: 900 - RNA, 19 nt, Artificial Sequence
  Synthetic
acgaggaagaggaggaggc

SEQ ID NO: 901 - RNA, 19 nt, Artificial Sequence
  Synthetic
cgaggaagaggaggaggcc

SEQ ID NO: 902 - RNA, 19 nt, Artificial Sequence
  Synthetic
gaggaagaggaggaggccg

SEQ ID NO: 903 - RNA, 19 nt, Artificial Sequence
  Synthetic
aggaagaggaggaggccga

SEQ ID NO: 904 - RNA, 19 nt, Artificial Sequence
  Synthetic
ggaagaggaggaggccgac

SEQ ID NO: 905 - RNA, 19 nt, Artificial Sequence
  Synthetic
gaagaggaggaggccgacg

SEQ ID NO: 906 - RNA, 19 nt, Artificial Sequence
  Synthetic
aagaggaggaggccgacgc

SEQ ID NO: 907 - RNA, 19 nt, Artificial Sequence
  Synthetic
agaggaggaggccgacgcc

SEQ ID NO: 908 - RNA, 19 nt, Artificial Sequence
  Synthetic
gcgcaaccaguuugagcug

SEQ ID NO: 909 - RNA, 19 nt, Artificial Sequence
  Synthetic
cgcaaccaguuugagcuga

SEQ ID NO: 910 - RNA, 19 nt, Artificial Sequence
  Synthetic
gcaaccaguuugagcugau

SEQ ID NO: 911 - RNA, 19 nt, Artificial Sequence
  Synthetic
caaccaguuugagcugaug

SEQ ID NO: 912 - RNA, 19 nt, Artificial Sequence
  Synthetic
aaccaguuugagcugaugu

SEQ ID NO: 913 - RNA, 19 nt, Artificial Sequence
  Synthetic
accaguuugagcugaugua

SEQ ID NO: 914 - RNA, 19 nt, Artificial Sequence
  Synthetic
ccaguuugagcugauguau

SEQ ID NO: 915 - RNA, 19 nt, Artificial Sequence
  Synthetic
caguuugagcugauguaug

SEQ ID NO: 916 - RNA, 19 nt, Artificial Sequence
  Synthetic
aguuugagcugauguaugu

SEQ ID NO: 917 - RNA, 19 nt, Artificial Sequence
  Synthetic
guuugagcugauguaugug

SEQ ID NO: 918 - RNA, 19 nt, Artificial Sequence
  Synthetic
uuugagcugauguauguga

SEQ ID NO: 919 - RNA, 19 nt, Artificial Sequence
  Synthetic
uugagcugauguaugugac

SEQ ID NO: 920 - RNA, 19 nt, Artificial Sequence
  Synthetic
ugagcugauguaugugacg

SEQ ID NO: 921 - RNA, 19 nt, Artificial Sequence
  Synthetic
gagcugauguaugugacgc

SEQ ID NO: 922 - RNA, 19 nt, Artificial Sequence
  Synthetic
agcugauguaugugacgcu

SEQ ID NO: 923 - RNA, 19 nt, Artificial Sequence
  Synthetic
gcugauguaugugacgcug

SEQ ID NO: 924 - RNA, 19 nt, Artificial Sequence
  Synthetic
cugauguaugugacgcuga

SEQ ID NO: 925 - RNA, 19 nt, Artificial Sequence
  Synthetic
ugauguaugugacgcugac

SEQ ID NO: 926 - RNA, 19 nt, Artificial Sequence
  Synthetic
gauguaugugacgcugaca

SEQ ID NO: 927 - RNA, 19 nt, Artificial Sequence
  Synthetic
gcgcaaccaguuugagcua

SEQ ID NO: 928 - RNA, 19 nt, Artificial Sequence
  Synthetic
cgcaaccaguuugagcuaa

SEQ ID NO: 929 - RNA, 19 nt, Artificial Sequence
  Synthetic
gcaaccaguuugagcuaau

SEQ ID NO: 930 - RNA, 19 nt, Artificial Sequence
  Synthetic
caaccaguuugagcuaaug

SEQ ID NO: 931 - RNA, 19 nt, Artificial Sequence
  Synthetic
aaccaguuugagcuaaugu

SEQ ID NO: 932 - RNA, 19 nt, Artificial Sequence
  Synthetic
accaguuugagcuaaugua

SEQ ID NO: 933 - RNA, 19 nt, Artificial Sequence
  Synthetic
ccaguuugagcuaauguau

SEQ ID NO: 934 - RNA, 19 nt, Artificial Sequence
  Synthetic
caguuugagcuaauguaug

SEQ ID NO: 935 - RNA, 19 nt, Artificial Sequence
  Synthetic
aguuugagcuaauguaugu

SEQ ID NO: 936 - RNA, 19 nt, Artificial Sequence
  Synthetic
guuugagcuaauguaugug

SEQ ID NO: 937 - RNA, 19 nt, Artificial Sequence
  Synthetic
uuugagcuaauguauguga

SEQ ID NO: 938 - RNA, 19 nt, Artificial Sequence
  Synthetic
uugagcuaauguaugugac

SEQ ID NO: 939 - RNA, 19 nt, Artificial Sequence
  Synthetic
ugagcuaauguaugugacg

SEQ ID NO: 940 - RNA, 19 nt, Artificial Sequence
  Synthetic
gagcuaauguaugugacgc

SEQ ID NO: 941 - RNA, 19 nt, Artificial Sequence
  Synthetic
agcuaauguaugugacgcu

SEQ ID NO: 942 - RNA, 19 nt, Artificial Sequence
  Synthetic
gcuaauguaugugacgcug

SEQ ID NO: 943 - RNA, 19 nt, Artificial Sequence
  Synthetic
cuaauguaugugacgcuga

SEQ ID NO: 944 - RNA, 19 nt, Artificial Sequence
  Synthetic
uaauguaugugacgcugac

SEQ ID NO: 945 - RNA, 19 nt, Artificial Sequence
  Synthetic
aauguaugugacgcugaca

SEQ ID NO: 946 - RNA, 19 nt, Artificial Sequence
  Synthetic
guuggagcccugcacggcg

SEQ ID NO: 947 - RNA, 19 nt, Artificial Sequence
  Synthetic
uuggagcccugcacggcgu

SEQ ID NO: 948 - RNA, 19 nt, Artificial Sequence
  Synthetic
uggagcccugcacggcguc

SEQ ID NO: 949 - RNA, 19 nt, Artificial Sequence
  Synthetic
ggagcccugcacggcgucc

SEQ ID NO: 950 - RNA, 19 nt, Artificial Sequence
  Synthetic
gagcccugcacggcguccu

SEQ ID NO: 951 - RNA, 19 nt, Artificial Sequence
  Synthetic
agcccugcacggcguccuc

SEQ ID NO: 952 - RNA, 19 nt, Artificial Sequence
  Synthetic
gcccugcacggcguccucu

SEQ ID NO: 953 - RNA, 19 nt, Artificial Sequence
  Synthetic
cccugcacggcguccucua

SEQ ID NO: 954 - RNA, 19 nt, Artificial Sequence
  Synthetic
ccugcacggcguccucuau

SEQ ID NO: 955 - RNA, 19 nt, Artificial Sequence
  Synthetic
cugcacggcguccucuaug

SEQ ID NO: 956 - RNA, 19 nt, Artificial Sequence
  Synthetic
ugcacggcguccucuaugu

SEQ ID NO: 957 - RNA, 19 nt, Artificial Sequence
  Synthetic
gcacggcguccucuaugug

SEQ ID NO: 958 - RNA, 19 nt, Artificial Sequence
  Synthetic
cacggcguccucuaugugc

SEQ ID NO: 959 - RNA, 19 nt, Artificial Sequence
  Synthetic
acggcguccucuaugugcu

SEQ ID NO: 960 - RNA, 19 nt, Artificial Sequence
  Synthetic
cggcguccucuaugugcug

SEQ ID NO: 961 - RNA, 19 nt, Artificial Sequence
  Synthetic
ggcguccucuaugugcugg

SEQ ID NO: 962 - RNA, 19 nt, Artificial Sequence
  Synthetic
gcguccucuaugugcugga

SEQ ID NO: 963 - RNA, 19 nt, Artificial Sequence
  Synthetic
cguccucuaugugcuggag

SEQ ID NO: 964 - RNA, 19 nt, Artificial Sequence
  Synthetic
guccucuaugugcuggagu

SEQ ID NO: 965 - RNA, 19 nt, Artificial Sequence
  Synthetic
guuggagcccugcacggca

SEQ ID NO: 966 - RNA, 19 nt, Artificial Sequence
  Synthetic
uuggagcccugcacggcau

SEQ ID NO: 967 - RNA, 19 nt, Artificial Sequence
  Synthetic
uggagcccugcacggcauc

SEQ ID NO: 968 - RNA, 19 nt, Artificial Sequence
  Synthetic
ggagcccugcacggcaucc

SEQ ID NO: 969 - RNA, 19 nt, Artificial Sequence
  Synthetic
gagcccugcacggcauccu

SEQ ID NO: 970 - RNA, 19 nt, Artificial Sequence
  Synthetic
agcccugcacggcauccuc

SEQ ID NO: 971 - RNA, 19 nt, Artificial Sequence
  Synthetic
gcccugcacggcauccucu

SEQ ID NO: 972 - RNA, 19 nt, Artificial Sequence
  Synthetic
cccugcacggcauccucua

SEQ ID NO: 973 - RNA, 19 nt, Artificial Sequence
  Synthetic
ccugcacggcauccucuau

SEQ ID NO: 974 - RNA, 19 nt, Artificial Sequence
  Synthetic
cugcacggcauccucuaug

SEQ ID NO: 975 - RNA, 19 nt, Artificial Sequence
  Synthetic
ugcacggcauccucuaugu

SEQ ID NO: 976 - RNA, 19 nt, Artificial Sequence
  Synthetic
gcacggcauccucuaugug

SEQ ID NO: 977 - RNA, 19 nt, Artificial Sequence
  Synthetic
cacggcauccucuaugugc

SEQ ID NO: 978 - RNA, 19 nt, Artificial Sequence
  Synthetic
acggcauccucuaugugcu

SEQ ID NO: 979 - RNA, 19 nt, Artificial Sequence
  Synthetic
cggcauccucuaugugcug

SEQ ID NO: 980 - RNA, 19 nt, Artificial Sequence
  Synthetic
ggcauccucuaugugcugg

SEQ ID NO: 981 - RNA, 19 nt, Artificial Sequence
  Synthetic
gcauccucuaugugcugga

SEQ ID NO: 982 - RNA, 19 nt, Artificial Sequence
  Synthetic
cauccucuaugugcuggag

SEQ ID NO: 983 - RNA, 19 nt, Artificial Sequence
  Synthetic
auccucuaugugcuggagu

SEQ ID NO: 984 - RNA, 19 nt, Artificial Sequence
  Synthetic
ucagacccuaauccugcag

SEQ ID NO: 985 - RNA, 19 nt, Artificial Sequence
  Synthetic
cagacccuaauccugcagc

SEQ ID NO: 986 - RNA, 19 nt, Artificial Sequence
  Synthetic
agacccuaauccugcagcc

SEQ ID NO: 987 - RNA, 19 nt, Artificial Sequence
  Synthetic
gacccuaauccugcagccc

SEQ ID NO: 988 - RNA, 19 nt, Artificial Sequence
  Synthetic
acccuaauccugcagcccc

SEQ ID NO: 989 - RNA, 19 nt, Artificial Sequence
  Synthetic
cccuaauccugcagccccc

SEQ ID NO: 990 - RNA, 19 nt, Artificial Sequence
  Synthetic
ccuaauccugcagcccccg

SEQ ID NO: 991 - RNA, 19 nt, Artificial Sequence
  Synthetic
cuaauccugcagcccccga

SEQ ID NO: 992 - RNA, 19 nt, Artificial Sequence
  Synthetic
uaauccugcagcccccgac

SEQ ID NO: 993 - RNA, 19 nt, Artificial Sequence
  Synthetic
aauccugcagcccccgaca

SEQ ID NO: 994 - RNA, 19 nt, Artificial Sequence
  Synthetic
auccugcagcccccgacag

SEQ ID NO: 995 - RNA, 19 nt, Artificial Sequence
  Synthetic
uccugcagcccccgacagc

SEQ ID NO: 996 - RNA, 19 nt, Artificial Sequence
  Synthetic
ccugcagcccccgacagcg

SEQ ID NO: 997 - RNA, 19 nt, Artificial Sequence
  Synthetic
cugcagcccccgacagcga

SEQ ID NO: 998 - RNA, 19 nt, Artificial Sequence
  Synthetic
ugcagcccccgacagcgag

SEQ ID NO: 999 - RNA, 19 nt, Artificial Sequence
  Synthetic
gcagcccccgacagcgagu

SEQ ID NO: 1000 - RNA, 19 nt, Artificial Sequence
  Synthetic
cagcccccgacagcgaguc

SEQ ID NO: 1001 - RNA, 19 nt, Artificial Sequence
  Synthetic
agcccccgacagcgaguca

SEQ ID NO: 1002 - RNA, 19 nt, Artificial Sequence
  Synthetic
gcccccgacagcgagucag

SEQ ID NO: 1003 - DNA, 19 bp, Artificial Sequence
  Synthetic
  misc_feature (1)..(18): RNA
ucagacccuaauccugcat

SEQ ID NO: 1004 - DNA, 19 bp, Artificial Sequence
  Synthetic
  misc_feature (1)..(17): RNA
  misc_feature (19)..(19): RNA
cagacccuaauccugcatc

SEQ ID NO: 1005 - DNA, 19 bp, Artificial Sequence
  Synthetic
  misc_feature (1)..(16): RNA
  misc_feature (18)..(19): RNA
agacccuaauccugcatcc

SEQ ID NO: 1006 - DNA, 19 bp, Artificial Sequence
  Synthetic
  misc_feature (1)..(15): RNA
  misc_feature (17)..(19): RNA
gacccuaauccugcatccc

SEQ ID NO: 1007 - DNA, 19 bp, Artificial Sequence
  Synthetic
  misc_feature (1)..(14): RNA
  misc_feature (16)..(19): RNA
acccuaauccugcatcccc

SEQ ID NO: 1008 - DNA, 19 bp, Artificial Sequence
  Synthetic
  misc_feature (1)..(13): RNA
  misc_feature (15)..(19): RNA
cccuaauccugcatccccc

SEQ ID NO: 1009 - DNA, 19 bp, Artificial Sequence
  Synthetic
  misc_feature (1)..(12): RNA
  misc_feature (14)..(19): RNA
ccuaauccugcatcccccg

SEQ ID NO: 1010 - DNA, 19 bp, Artificial Sequence
  Synthetic
  misc_feature (1)..(11): RNA
  misc_feature (13)..(19): RNA
cuaauccugcatcccccga

SEQ ID NO: 1011 - DNA, 19 bp, Artificial Sequence
  Synthetic
  misc_feature (1)..(10): RNA
  misc_feature (12)..(19): RNA
uaauccugcatcccccgac

SEQ ID NO: 1012 - DNA, 19 bp, Artificial Sequence
  Synthetic
  misc_feature (1)..(9): RNA
  misc_feature (11)..(19): RNA
aauccugcatcccccgaca

SEQ ID NO: 1013 - DNA, 19 bp, Artificial Sequence
  Synthetic
  misc_feature (1)..(8): RNA
  misc_feature (10)..(19): RNA
auccugcatcccccgacag

SEQ ID NO: 1014 - DNA, 19 bp, Artificial Sequence
  Synthetic
  misc_feature (1)..(7): RNA
  misc_feature (9)..(19): RNA
uccugcatcccccgacagc

SEQ ID NO: 1015 - DNA, 19 bp, Artificial Sequence
  Synthetic
  misc_feature (1)..(6): RNA
  misc_feature (8)..(19): RNA
ccugcatcccccgacagcg

SEQ ID NO: 1016 - DNA, 19 bp, Artificial Sequence
  Synthetic
  misc_feature (1)..(5): RNA
  misc_feature (7)..(19): RNA
cugcatcccccgacagcga

SEQ ID NO: 1017 - DNA, 19 bp, Artificial Sequence
  Synthetic
  misc_feature (1)..(4): RNA
  misc_feature (6)..(19): RNA
ugcatcccccgacagcgag

SEQ ID NO: 1018 - DNA, 19 bp, Artificial Sequence
  Synthetic
  misc_feature (1)..(3): RNA
  misc_feature (5)..(19): RNA
gcatcccccgacagcgagu

SEQ ID NO: 1019 - DNA, 19 bp, Artificial Sequence
  Synthetic
  misc_feature (1)..(2): RNA
  misc_feature (4)..(19): RNA
catcccccgacagcgaguc

SEQ ID NO: 1020 - DNA, 19 bp, Artificial Sequence
  Synthetic
  misc_feature (1)..(1): RNA
  misc_feature (3)..(19): RNA
atcccccgacagcgaguca

SEQ ID NO: 1021 - DNA, 19 bp, Artificial Sequence
  Synthetic
  misc_feature (2)..(19): RNA
tcccccgacagcgagucag

SEQ ID NO: 1022 - RNA, 19 nt, Artificial Sequence
  Synthetic
agccccaggaagcccauau

SEQ ID NO: 1023 - RNA, 19 nt, Artificial Sequence
  Synthetic
gccccaggaagcccauauc

SEQ ID NO: 1024 - RNA, 19 nt, Artificial Sequence
  Synthetic
ccccaggaagcccauauca

SEQ ID NO: 1025 - RNA, 19 nt, Artificial Sequence
  Synthetic
cccaggaagcccauaucac

SEQ ID NO: 1026 - RNA, 19 nt, Artificial Sequence
  Synthetic
ccaggaagcccauaucacc

SEQ ID NO: 1027 - RNA, 19 nt, Artificial Sequence
  Synthetic
caggaagcccauaucaccg

SEQ ID NO: 1028 - RNA, 19 nt, Artificial Sequence
  Synthetic
aggaagcccauaucaccgg

SEQ ID NO: 1029 - RNA, 19 nt, Artificial Sequence
  Synthetic
ggaagcccauaucaccggc

SEQ ID NO: 1030 - RNA, 19 nt, Artificial Sequence
  Synthetic
gaagcccauaucaccggcu

SEQ ID NO: 1031 - RNA, 19 nt, Artificial Sequence
  Synthetic
aagcccauaucaccggcug

SEQ ID NO: 1032 - RNA, 19 nt, Artificial Sequence
  Synthetic
agcccauaucaccggcugc

SEQ ID NO: 1033 - RNA, 19 nt, Artificial Sequence
  Synthetic
gcccauaucaccggcugcu

SEQ ID NO: 1034 - RNA, 19 nt, Artificial Sequence
  Synthetic
cccauaucaccggcugcug

SEQ ID NO: 1035 - RNA, 19 nt, Artificial Sequence
  Synthetic
ccauaucaccggcugcuga

SEQ ID NO: 1036 - RNA, 19 nt, Artificial Sequence
  Synthetic
cauaucaccggcugcugac

SEQ ID NO: 1037 - RNA, 19 nt, Artificial Sequence
  Synthetic
auaucaccggcugcugacu

SEQ ID NO: 1038 - RNA, 19 nt, Artificial Sequence
  Synthetic
uaucaccggcugcugacuu

SEQ ID NO: 1039 - RNA, 19 nt, Artificial Sequence
  Synthetic
aucaccggcugcugacuug

SEQ ID NO: 1040 - RNA, 19 nt, Artificial Sequence
  Synthetic
ucaccggcugcugacuugu

SEQ ID NO: 1041 - RNA, 19 nt, Artificial Sequence
  Synthetic
agccccaggaagcccauac

SEQ ID NO: 1042 - RNA, 19 nt, Artificial Sequence
  Synthetic
gccccaggaagcccauacc

SEQ ID NO: 1043 - RNA, 19 nt, Artificial Sequence
  Synthetic
ccccaggaagcccauacca

SEQ ID NO: 1044 - RNA, 19 nt, Artificial Sequence
  Synthetic
cccaggaagcccauaccac

SEQ ID NO: 1045 - RNA, 19 nt, Artificial Sequence
  Synthetic
ccaggaagcccauaccacc

SEQ ID NO: 1046 - RNA, 19 nt, Artificial Sequence
  Synthetic
caggaagcccauaccaccg

SEQ ID NO: 1047 - RNA, 19 nt, Artificial Sequence
  Synthetic
aggaagcccauaccaccgg

SEQ ID NO: 1048 - RNA, 19 nt, Artificial Sequence
  Synthetic
ggaagcccauaccaccggc

SEQ ID NO: 1049 - RNA, 19 nt, Artificial Sequence
  Synthetic
gaagcccauaccaccggcu

SEQ ID NO: 1050 - RNA, 19 nt, Artificial Sequence
  Synthetic
aagcccauaccaccggcug

SEQ ID NO: 1051 - RNA, 19 nt, Artificial Sequence
  Synthetic
agcccauaccaccggcugc

SEQ ID NO: 1052 - RNA, 19 nt, Artificial Sequence
  Synthetic
gcccauaccaccggcugcu

SEQ ID NO: 1053 - RNA, 19 nt, Artificial Sequence
  Synthetic
cccauaccaccggcugcug

SEQ ID NO: 1054 - RNA, 19 nt, Artificial Sequence
  Synthetic
ccauaccaccggcugcuga

SEQ ID NO: 1055 - RNA, 19 nt, Artificial Sequence
  Synthetic
cauaccaccggcugcugac

SEQ ID NO: 1056 - RNA, 19 nt, Artificial Sequence
  Synthetic
auaccaccggcugcugacu

SEQ ID NO: 1057 - RNA, 19 nt, Artificial Sequence
  Synthetic
uaccaccggcugcugacuu

SEQ ID NO: 1058 - RNA, 19 nt, Artificial Sequence
  Synthetic
accaccggcugcugacuug

SEQ ID NO: 1059 - RNA, 19 nt, Artificial Sequence
  Synthetic
ccaccggcugcugacuugu

SEQ ID NO: 1060 - RNA, 19 nt, Artificial Sequence
  Synthetic
ggagccuuuggaagucugu

SEQ ID NO: 1061 - RNA, 19 nt, Artificial Sequence
  Synthetic
gagccuuuggaagucugug

SEQ ID NO: 1062 - RNA, 19 nt, Artificial Sequence
  Synthetic
agccuuuggaagucugugc

SEQ ID NO: 1063 - RNA, 19 nt, Artificial Sequence
  Synthetic
gccuuuggaagucugugcc

SEQ ID NO: 1064 - RNA, 19 nt, Artificial Sequence
  Synthetic
ccuuuggaagucugugccc

SEQ ID NO: 1065 - RNA, 19 nt, Artificial Sequence
  Synthetic
cuuuggaagucugugcccu

SEQ ID NO: 1066 - RNA, 19 nt, Artificial Sequence
  Synthetic
uuuggaagucugugcccuu

SEQ ID NO: 1067 - RNA, 19 nt, Artificial Sequence
  Synthetic
uuggaagucugugcccuug

SEQ ID NO: 1068 - RNA, 19 nt, Artificial Sequence
  Synthetic
uggaagucugugcccuugu

SEQ ID NO: 1069 - RNA, 19 nt, Artificial Sequence
  Synthetic
ggaagucugugcccuugug

SEQ ID NO: 1070 - RNA, 19 nt, Artificial Sequence
  Synthetic
gaagucugugcccuugugc

SEQ ID NO: 1071 - RNA, 19 nt, Artificial Sequence
  Synthetic
aagucugugcccuugugcc

SEQ ID NO: 1072 - RNA, 19 nt, Artificial Sequence
  Synthetic
agucugugcccuugugccc

SEQ ID NO: 1073 - RNA, 19 nt, Artificial Sequence
  Synthetic
gucugugcccuugugcccu

SEQ ID NO: 1074 - RNA, 19 nt, Artificial Sequence
  Synthetic
ucugugcccuugugcccug

SEQ ID NO: 1075 - RNA, 19 nt, Artificial Sequence
  Synthetic
cugugcccuugugcccugc

SEQ ID NO: 1076 - RNA, 19 nt, Artificial Sequence
  Synthetic
ugugcccuugugcccugcc

SEQ ID NO: 1077 - RNA, 19 nt, Artificial Sequence
  Synthetic
gugcccuugugcccugccu

SEQ ID NO: 1078 - RNA, 19 nt, Artificial Sequence
  Synthetic
ugcccuugugcccugccuc

SEQ ID NO: 1079 - RNA, 19 nt, Artificial Sequence
  Synthetic
ggagccuuuggaagucugc

SEQ ID NO: 1080 - RNA, 19 nt, Artificial Sequence
  Synthetic
gagccuuuggaagucugcg

SEQ ID NO: 1081 - RNA, 19 nt, Artificial Sequence
  Synthetic
agccuuuggaagucugcgc

SEQ ID NO: 1082 - RNA, 19 nt, Artificial Sequence
  Synthetic
gccuuuggaagucugcgcc

SEQ ID NO: 1083 - RNA, 19 nt, Artificial Sequence
  Synthetic
ccuuuggaagucugcgccc

SEQ ID NO: 1084 - RNA, 19 nt, Artificial Sequence
  Synthetic
cuuuggaagucugcgcccu

SEQ ID NO: 1085 - RNA, 19 nt, Artificial Sequence
  Synthetic
uuuggaagucugcgcccuu

SEQ ID NO: 1086 - RNA, 19 nt, Artificial Sequence
  Synthetic
uuggaagucugcgcccuug

SEQ ID NO: 1087 - RNA, 19 nt, Artificial Sequence
  Synthetic
uggaagucugcgcccuugu

SEQ ID NO: 1088 - RNA, 19 nt, Artificial Sequence
  Synthetic
ggaagucugcgcccuugug

SEQ ID NO: 1089 - RNA, 19 nt, Artificial Sequence
  Synthetic
gaagucugcgcccuugugc

SEQ ID NO: 1090 - RNA, 19 nt, Artificial Sequence
  Synthetic
aagucugcgcccuugugcc

SEQ ID NO: 1091 - RNA, 19 nt, Artificial Sequence
  Synthetic
agucugcgcccuugugccc

SEQ ID NO: 1092 - RNA, 19 nt, Artificial Sequence
  Synthetic
gucugcgcccuugugcccu

SEQ ID NO: 1093 - RNA, 19 nt, Artificial Sequence
  Synthetic
ucugcgcccuugugcccug

SEQ ID NO: 1094 - RNA, 19 nt, Artificial Sequence
  Synthetic
cugcgcccuugugcccugc

SEQ ID NO: 1095 - RNA, 19 nt, Artificial Sequence
  Synthetic
ugcgcccuugugcccugcc

SEQ ID NO: 1096 - RNA, 19 nt, Artificial Sequence
  Synthetic
gcgcccuugugcccugccu

SEQ ID NO: 1097 - RNA, 19 nt, Artificial Sequence
  Synthetic
cgcccuugugcccugccuc

SEQ ID NO: 1098 - RNA, 19 nt, Artificial Sequence
  Synthetic
gcugguuguugccagguug

SEQ ID NO: 1099 - RNA, 19 nt, Artificial Sequence
  Synthetic
cugguuguugccagguugc

SEQ ID NO: 1100 - RNA, 19 nt, Artificial Sequence
  Synthetic
ugguuguugccagguugca

SEQ ID NO: 1101 - RNA, 19 nt, Artificial Sequence
  Synthetic
gguuguugccagguugcag

SEQ ID NO: 1102 - RNA, 19 nt, Artificial Sequence
  Synthetic
guuguugccagguugcagc

SEQ ID NO: 1103 - RNA, 19 nt, Artificial Sequence
  Synthetic
uuguugccagguugcagcu

SEQ ID NO: 1104 - RNA, 19 nt, Artificial Sequence
  Synthetic
uguugccagguugcagcug

SEQ ID NO: 1105 - RNA, 19 nt, Artificial Sequence
  Synthetic
guugccagguugcagcugc

SEQ ID NO: 1106 - RNA, 19 nt, Artificial Sequence
  Synthetic
uugccagguugcagcugcu

SEQ ID NO: 1107 - RNA, 19 nt, Artificial Sequence
  Synthetic
ugccagguugcagcugcuc

SEQ ID NO: 1108 - RNA, 19 nt, Artificial Sequence
  Synthetic
gccagguugcagcugcucu

SEQ ID NO: 1109 - RNA, 19 nt, Artificial Sequence
  Synthetic
ccagguugcagcugcucuu

SEQ ID NO: 1110 - RNA, 19 nt, Artificial Sequence
  Synthetic
cagguugcagcugcucuug

SEQ ID NO: 1111 - RNA, 19 nt, Artificial Sequence
  Synthetic
agguugcagcugcucuugc

SEQ ID NO: 1112 - RNA, 19 nt, Artificial Sequence
  Synthetic
gguugcagcugcucuugca

SEQ ID NO: 1113 - RNA, 19 nt, Artificial Sequence
  Synthetic
guugcagcugcucuugcau

SEQ ID NO: 1114 - RNA, 19 nt, Artificial Sequence
  Synthetic
uugcagcugcucuugcauc

SEQ ID NO: 1115 - RNA, 19 nt, Artificial Sequence
  Synthetic
ugcagcugcucuugcaucu

SEQ ID NO: 1116 - RNA, 19 nt, Artificial Sequence
  Synthetic
gcagcugcucuugcaucug

SEQ ID NO: 1117 - RNA, 19 nt, Artificial Sequence
  Synthetic
gcugguuguugccagguua

SEQ ID NO: 1118 - RNA, 19 nt, Artificial Sequence
  Synthetic
cugguuguugccagguuac

SEQ ID NO: 1119 - RNA, 19 nt, Artificial Sequence
  Synthetic
ugguuguugccagguuaca

SEQ ID NO: 1120 - RNA, 19 nt, Artificial Sequence
  Synthetic
gguuguugccagguuacag

SEQ ID NO: 1121 - RNA, 19 nt, Artificial Sequence
  Synthetic
guuguugccagguuacagc

SEQ ID NO: 1122 - RNA, 19 nt, Artificial Sequence
  Synthetic
uuguugccagguuacagcu

SEQ ID NO: 1123 - RNA, 19 nt, Artificial Sequence
  Synthetic
uguugccagguuacagcug

SEQ ID NO: 1124 - RNA, 19 nt, Artificial Sequence
  Synthetic
guugccagguuacagcugc

SEQ ID NO: 1125 - RNA, 19 nt, Artificial Sequence
  Synthetic
uugccagguuacagcugcu

SEQ ID NO: 1126 - RNA, 19 nt, Artificial Sequence
  Synthetic
ugccagguuacagcugcuc

SEQ ID NO: 1127 - RNA, 19 nt, Artificial Sequence
  Synthetic
gccagguuacagcugcucu

SEQ ID NO: 1128 - RNA, 19 nt, Artificial Sequence
  Synthetic
ccagguuacagcugcucuu

SEQ ID NO: 1129 - RNA, 19 nt, Artificial Sequence
  Synthetic
cagguuacagcugcucuug

SEQ ID NO: 1130 - RNA, 19 nt, Artificial Sequence
  Synthetic
agguuacagcugcucuugc

SEQ ID NO: 1131 - RNA, 19 nt, Artificial Sequence
  Synthetic
gguuacagcugcucuugca

SEQ ID NO: 1132 - RNA, 19 nt, Artificial Sequence
  Synthetic
guuacagcugcucuugcau

SEQ ID NO: 1133 - RNA, 19 nt, Artificial Sequence
  Synthetic
uuacagcugcucuugcauc

SEQ ID NO: 1134 - RNA, 19 nt, Artificial Sequence
  Synthetic
uacagcugcucuugcaucu

SEQ ID NO: 1135 - RNA, 19 nt, Artificial Sequence
  Synthetic
acagcugcucuugcaucug

SEQ ID NO: 1136 - RNA, 19 nt, Artificial Sequence
  Synthetic
cucccuccugcaggcuggc

SEQ ID NO: 1137 - RNA, 19 nt, Artificial Sequence
  Synthetic
ucccuccugcaggcuggcu

SEQ ID NO: 1138 - RNA, 19 nt, Artificial Sequence
  Synthetic
cccuccugcaggcuggcug

SEQ ID NO: 1139 - RNA, 19 nt, Artificial Sequence
  Synthetic
ccuccugcaggcuggcugu

SEQ ID NO: 1140 - RNA, 19 nt, Artificial Sequence
  Synthetic
cuccugcaggcuggcuguu

SEQ ID NO: 1141 - RNA, 19 nt, Artificial Sequence
  Synthetic
uccugcaggcuggcuguug

SEQ ID NO: 1142 - RNA, 19 nt, Artificial Sequence
  Synthetic
ccugcaggcuggcuguugg

SEQ ID NO: 1143 - RNA, 19 nt, Artificial Sequence
  Synthetic
cugcaggcuggcuguuggc

SEQ ID NO: 1144 - RNA, 19 nt, Artificial Sequence
  Synthetic
ugcaggcuggcuguuggcc

SEQ ID NO: 1145 - RNA, 19 nt, Artificial Sequence
  Synthetic
gcaggcuggcuguuggccc

SEQ ID NO: 1146 - RNA, 19 nt, Artificial Sequence
  Synthetic
caggcuggcuguuggcccc

SEQ ID NO: 1147 - RNA, 19 nt, Artificial Sequence
  Synthetic
aggcuggcuguuggccccu

SEQ ID NO: 1148 - RNA, 19 nt, Artificial Sequence
  Synthetic
ggcuggcuguuggccccuc

SEQ ID NO: 1149 - RNA, 19 nt, Artificial Sequence
  Synthetic
gcuggcuguuggccccucu

SEQ ID NO: 1150 - RNA, 19 nt, Artificial Sequence
  Synthetic
cuggcuguuggccccucug

SEQ ID NO: 1151 - RNA, 19 nt, Artificial Sequence
  Synthetic
uggcuguuggccccucugc

SEQ ID NO: 1152 - RNA, 19 nt, Artificial Sequence
  Synthetic
ggcuguuggccccucugcu

SEQ ID NO: 1153 - RNA, 19 nt, Artificial Sequence
  Synthetic
gcuguuggccccucugcug

SEQ ID NO: 1154 - RNA, 19 nt, Artificial Sequence
  Synthetic
cuguuggccccucugcugu

SEQ ID NO: 1155 - RNA, 19 nt, Artificial Sequence
  Synthetic
cucccuccugcaggcuggg

SEQ ID NO: 1156 - RNA, 19 nt, Artificial Sequence
  Synthetic
ucccuccugcaggcugggu

SEQ ID NO: 1157 - RNA, 19 nt, Artificial Sequence
  Synthetic
cccuccugcaggcugggug

SEQ ID NO: 1158 - RNA, 19 nt, Artificial Sequence
  Synthetic
ccuccugcaggcugggugu

SEQ ID NO: 1159 - RNA, 19 nt, Artificial Sequence
  Synthetic
cuccugcaggcuggguguu

SEQ ID NO: 1160 - RNA, 19 nt, Artificial Sequence
  Synthetic
uccugcaggcuggguguug

SEQ ID NO: 1161 - RNA, 19 nt, Artificial Sequence
  Synthetic
ccugcaggcuggguguugg

SEQ ID NO: 1162 - RNA, 19 nt, Artificial Sequence
  Synthetic
cugcaggcuggguguuggc

SEQ ID NO: 1163 - RNA, 19 nt, Artificial Sequence
  Synthetic
ugcaggcuggguguuggcc

SEQ ID NO: 1164 - RNA, 19 nt, Artificial Sequence
  Synthetic
gcaggcuggguguuggccc

SEQ ID NO: 1165 - RNA, 19 nt, Artificial Sequence
  Synthetic
caggcuggguguuggcccc

SEQ ID NO: 1166 - RNA, 19 nt, Artificial Sequence
  Synthetic
aggcuggguguuggccccu

SEQ ID NO: 1167 - RNA, 19 nt, Artificial Sequence
  Synthetic
uguuggccccucugcuguc

SEQ ID NO: 1168 - RNA, 19 nt, Artificial Sequence
  Synthetic
guuggccccucugcugucc

SEQ ID NO: 1169 - RNA, 19 nt, Artificial Sequence
  Synthetic
uuggccccucugcuguccu

SEQ ID NO: 1170 - RNA, 19 nt, Artificial Sequence
  Synthetic
uggccccucugcuguccug

SEQ ID NO: 1171 - RNA, 19 nt, Artificial Sequence
  Synthetic
ggccccucugcuguccugc

SEQ ID NO: 1172 - RNA, 19 nt, Artificial Sequence
  Synthetic
gccccucugcuguccugca

SEQ ID NO: 1173 - RNA, 19 nt, Artificial Sequence
  Synthetic
ccccucugcuguccugcag

SEQ ID NO: 1174 - RNA, 19 nt, Artificial Sequence
  Synthetic
cccucugcuguccugcagu

SEQ ID NO: 1175 - RNA, 19 nt, Artificial Sequence
  Synthetic
ccucugcuguccugcagua

SEQ ID NO: 1176 - RNA, 19 nt, Artificial Sequence
  Synthetic
cucugcuguccugcaguag

SEQ ID NO: 1177 - RNA, 19 nt, Artificial Sequence
  Synthetic
ucugcuguccugcaguaga

SEQ ID NO: 1178 - RNA, 19 nt, Artificial Sequence
  Synthetic
cugcuguccugcaguagaa

SEQ ID NO: 1179 - RNA, 19 nt, Artificial Sequence
  Synthetic
ggcuggcuguuggccccug

SEQ ID NO: 1180 - RNA, 19 nt, Artificial Sequence
  Synthetic
gcuggcuguuggccccugu

SEQ ID NO: 1181 - RNA, 19 nt, Artificial Sequence
  Synthetic
cuggcuguuggccccugug

SEQ ID NO: 1182 - RNA, 19 nt, Artificial Sequence
  Synthetic
uggcuguuggccccugugc

SEQ ID NO: 1183 - RNA, 19 nt, Artificial Sequence
  Synthetic
ggcuguuggccccugugcu

SEQ ID NO: 1184 - RNA, 19 nt, Artificial Sequence
  Synthetic
gcuguuggccccugugcug

SEQ ID NO: 1185 - RNA, 19 nt, Artificial Sequence
  Synthetic
cuguuggccccugugcugu

SEQ ID NO: 1186 - RNA, 19 nt, Artificial Sequence
  Synthetic
uguuggccccugugcuguc

SEQ ID NO: 1187 - RNA, 19 nt, Artificial Sequence
  Synthetic
guuggccccugugcugucc

SEQ ID NO: 1188 - RNA, 19 nt, Artificial Sequence
  Synthetic
uuggccccugugcuguccu

SEQ ID NO: 1189 - RNA, 19 nt, Artificial Sequence
  Synthetic
uggccccugugcuguccug

SEQ ID NO: 1190 - RNA, 19 nt, Artificial Sequence
  Synthetic
ggccccugugcuguccugc

SEQ ID NO: 1191 - RNA, 19 nt, Artificial Sequence
  Synthetic
gccccugugcuguccugca

SEQ ID NO: 1192 - RNA, 19 nt, Artificial Sequence
  Synthetic
ccccugugcuguccugcag

SEQ ID NO: 1193 - RNA, 19 nt, Artificial Sequence
  Synthetic
cccugugcuguccugcagu

SEQ ID NO: 1194 - RNA, 19 nt, Artificial Sequence
  Synthetic
ccugugcuguccugcagua

SEQ ID NO: 1195 - RNA, 19 nt, Artificial Sequence
  Synthetic
cugugcuguccugcaguag

SEQ ID NO: 1196 - RNA, 19 nt, Artificial Sequence
  Synthetic
ugugcuguccugcaguaga

SEQ ID NO: 1197 - RNA, 19 nt, Artificial Sequence
  Synthetic
gugcuguccugcaguagaa

SEQ ID NO: 1198 - RNA, 19 nt, Artificial Sequence
  Synthetic
augcacagaugccauggcc

SEQ ID NO: 1199 - RNA, 19 nt, Artificial Sequence
  Synthetic
ugcacagaugccauggccu

SEQ ID NO: 1200 - RNA, 19 nt, Artificial Sequence
  Synthetic
gcacagaugccauggccug

SEQ ID NO: 1201 - RNA, 19 nt, Artificial Sequence
  Synthetic
cacagaugccauggccugu

SEQ ID NO: 1202 - RNA, 19 nt, Artificial Sequence
  Synthetic
acagaugccauggccugug

SEQ ID NO: 1203 - RNA, 19 nt, Artificial Sequence
  Synthetic
cagaugccauggccugugc

SEQ ID NO: 1204 - RNA, 19 nt, Artificial Sequence
  Synthetic
agaugccauggccugugcu

SEQ ID NO: 1205 - RNA, 19 nt, Artificial Sequence
  Synthetic
gaugccauggccugugcug

SEQ ID NO: 1206 - RNA, 19 nt, Artificial Sequence
  Synthetic
augccauggccugugcugg

SEQ ID NO: 1207 - RNA, 19 nt, Artificial Sequence
  Synthetic
ugccauggccugugcuggg

SEQ ID NO: 1208 - RNA, 19 nt, Artificial Sequence
  Synthetic
gccauggccugugcugggc

SEQ ID NO: 1209 - RNA, 19 nt, Artificial Sequence
  Synthetic
ccauggccugugcugggcc

SEQ ID NO: 1210 - RNA, 19 nt, Artificial Sequence
  Synthetic
cauggccugugcugggcca

SEQ ID NO: 1211 - RNA, 19 nt, Artificial Sequence
  Synthetic
auggccugugcugggccag

SEQ ID NO: 1212 - RNA, 19 nt, Artificial Sequence
  Synthetic
uggccugugcugggccagu

SEQ ID NO: 1213 - RNA, 19 nt, Artificial Sequence
  Synthetic
ggccugugcugggccagug

SEQ ID NO: 1214 - RNA, 19 nt, Artificial Sequence
  Synthetic
gccugugcugggccagugg

SEQ ID NO: 1215 - RNA, 19 nt, Artificial Sequence
  Synthetic
ccugugcugggccaguggc

SEQ ID NO: 1216 - RNA, 19 nt, Artificial Sequence
  Synthetic
cugugcugggccaguggcu

SEQ ID NO: 1217 - RNA, 19 nt, Artificial Sequence
  Synthetic
augcacagaugccauggca

SEQ ID NO: 1218 - RNA, 19 nt, Artificial Sequence
  Synthetic
ugcacagaugccauggcau

SEQ ID NO: 1219 - RNA, 19 nt, Artificial Sequence
  Synthetic
gcacagaugccauggcaug

SEQ ID NO: 1220 - RNA, 19 nt, Artificial Sequence
  Synthetic
cacagaugccauggcaugu

SEQ ID NO: 1221 - RNA, 19 nt, Artificial Sequence
  Synthetic
acagaugccauggcaugug

SEQ ID NO: 1222 - RNA, 19 nt, Artificial Sequence
  Synthetic
cagaugccauggcaugugc

SEQ ID NO: 1223 - RNA, 19 nt, Artificial Sequence
  Synthetic
agaugccauggcaugugcu

SEQ ID NO: 1224 - RNA, 19 nt, Artificial Sequence
  Synthetic
gaugccauggcaugugcug

SEQ ID NO: 1225 - RNA, 19 nt, Artificial Sequence
  Synthetic
augccauggcaugugcugg

SEQ ID NO: 1226 - RNA, 19 nt, Artificial Sequence
  Synthetic
ugccauggcaugugcuggg

SEQ ID NO: 1227 - RNA, 19 nt, Artificial Sequence
  Synthetic
gccauggcaugugcugggc

SEQ ID NO: 1228 - RNA, 19 nt, Artificial Sequence
  Synthetic
ccauggcaugugcugggcc

SEQ ID NO: 1229 - RNA, 19 nt, Artificial Sequence
  Synthetic
cauggcaugugcugggcca

SEQ ID NO: 1230 - RNA, 19 nt, Artificial Sequence
  Synthetic
auggcaugugcugggccag

SEQ ID NO: 1231 - RNA, 19 nt, Artificial Sequence
  Synthetic
uggcaugugcugggccagu

SEQ ID NO: 1232 - RNA, 19 nt, Artificial Sequence
  Synthetic
ggcaugugcugggccagug

SEQ ID NO: 1233 - RNA, 19 nt, Artificial Sequence
  Synthetic
gcaugugcugggccagugg

SEQ ID NO: 1234 - RNA, 19 nt, Artificial Sequence
  Synthetic
caugugcugggccaguggc

SEQ ID NO: 1235 - RNA, 19 nt, Artificial Sequence
  Synthetic
augugcugggccaguggcu

SEQ ID NO: 1236 - RNA, 19 nt, Artificial Sequence
  Synthetic
cugggggugcuagacaccc

SEQ ID NO: 1237 - RNA, 19 nt, Artificial Sequence
  Synthetic
ugggggugcuagacacccg

SEQ ID NO: 1238 - RNA, 19 nt, Artificial Sequence
  Synthetic
gggggugcuagacacccgg

SEQ ID NO: 1239 - RNA, 19 nt, Artificial Sequence
  Synthetic
ggggugcuagacacccggc

SEQ ID NO: 1240 - RNA, 19 nt, Artificial Sequence
  Synthetic
gggugcuagacacccggca

SEQ ID NO: 1241 - RNA, 19 nt, Artificial Sequence
  Synthetic
ggugcuagacacccggcac

SEQ ID NO: 1242 - RNA, 19 nt, Artificial Sequence
  Synthetic
gugcuagacacccggcacc

SEQ ID NO: 1243 - RNA, 19 nt, Artificial Sequence
  Synthetic
ugcuagacacccggcacca

SEQ ID NO: 1244 - RNA, 19 nt, Artificial Sequence
  Synthetic
gcuagacacccggcaccau

SEQ ID NO: 1245 - RNA, 19 nt, Artificial Sequence
  Synthetic
cuagacacccggcaccauu

SEQ ID NO: 1246 - RNA, 19 nt, Artificial Sequence
  Synthetic
uagacacccggcaccauuc

SEQ ID NO: 1247 - RNA, 19 nt, Artificial Sequence
  Synthetic
agacacccggcaccauucu

SEQ ID NO: 1248 - RNA, 19 nt, Artificial Sequence
  Synthetic
gacacccggcaccauucuc

SEQ ID NO: 1249 - RNA, 19 nt, Artificial Sequence
  Synthetic
acacccggcaccauucucc

SEQ ID NO: 1250 - RNA, 19 nt, Artificial Sequence
  Synthetic
cacccggcaccauucuccc

SEQ ID NO: 1251 - RNA, 19 nt, Artificial Sequence
  Synthetic
acccggcaccauucucccu

SEQ ID NO: 1252 - RNA, 19 nt, Artificial Sequence
  Synthetic
cccggcaccauucucccuu

SEQ ID NO: 1253 - RNA, 19 nt, Artificial Sequence
  Synthetic
ccggcaccauucucccuuc

SEQ ID NO: 1254 - RNA, 19 nt, Artificial Sequence
  Synthetic
cggcaccauucucccuucu

SEQ ID NO: 1255 - RNA, 19 nt, Artificial Sequence
  Synthetic
cugggggugcuagacaccu

SEQ ID NO: 1256 - RNA, 19 nt, Artificial Sequence
  Synthetic
ugggggugcuagacaccug

SEQ ID NO: 1257 - RNA, 19 nt, Artificial Sequence
  Synthetic
gggggugcuagacaccugg

SEQ ID NO: 1258 - RNA, 19 nt, Artificial Sequence
  Synthetic
ggggugcuagacaccuggc

SEQ ID NO: 1259 - RNA, 19 nt, Artificial Sequence
  Synthetic
gggugcuagacaccuggca

SEQ ID NO: 1260 - RNA, 19 nt, Artificial Sequence
  Synthetic
ggugcuagacaccuggcac

SEQ ID NO: 1261 - RNA, 19 nt, Artificial Sequence
  Synthetic
gugcuagacaccuggcacc

SEQ ID NO: 1262 - RNA, 19 nt, Artificial Sequence
  Synthetic
ugcuagacaccuggcacca

SEQ ID NO: 1263 - RNA, 19 nt, Artificial Sequence
  Synthetic
gcuagacaccuggcaccau

SEQ ID NO: 1264 - RNA, 19 nt, Artificial Sequence
  Synthetic
cuagacaccuggcaccauu

SEQ ID NO: 1265 - RNA, 19 nt, Artificial Sequence
  Synthetic
uagacaccuggcaccauuc

SEQ ID NO: 1266 - RNA, 19 nt, Artificial Sequence
  Synthetic
agacaccuggcaccauucu

SEQ ID NO: 1267 - RNA, 19 nt, Artificial Sequence
  Synthetic
gacaccuggcaccauucuc

SEQ ID NO: 1268 - RNA, 19 nt, Artificial Sequence
  Synthetic
acaccuggcaccauucucc

SEQ ID NO: 1269 - RNA, 19 nt, Artificial Sequence
  Synthetic
caccuggcaccauucuccc

SEQ ID NO: 1270 - RNA, 19 nt, Artificial Sequence
  Synthetic
accuggcaccauucucccu

SEQ ID NO: 1271 - RNA, 19 nt, Artificial Sequence
  Synthetic
ccuggcaccauucucccuu

SEQ ID NO: 1272 - RNA, 19 nt, Artificial Sequence
  Synthetic
cuggcaccauucucccuuc

SEQ ID NO: 1273 - RNA, 19 nt, Artificial Sequence
  Synthetic
uggcaccauucucccuucu

SEQ ID NO: 1274 - RNA, 19 nt, Artificial Sequence
  Synthetic
uguguuuugucugagccuc

SEQ ID NO: 1275 - RNA, 19 nt, Artificial Sequence
  Synthetic
guguuuugucugagccucu

SEQ ID NO: 1276 - RNA, 19 nt, Artificial Sequence
  Synthetic
uguuuugucugagccucuc

SEQ ID NO: 1277 - RNA, 19 nt, Artificial Sequence
  Synthetic
guuuugucugagccucucu

SEQ ID NO: 1278 - RNA, 19 nt, Artificial Sequence
  Synthetic
uuuugucugagccucucuc

SEQ ID NO: 1279 - RNA, 19 nt, Artificial Sequence
  Synthetic
uuugucugagccucucucg

SEQ ID NO: 1280 - RNA, 19 nt, Artificial Sequence
  Synthetic
uugucugagccucucucgg

SEQ ID NO: 1281 - RNA, 19 nt, Artificial Sequence
  Synthetic
ugucugagccucucucggu

SEQ ID NO: 1282 - RNA, 19 nt, Artificial Sequence
  Synthetic
gucugagccucucucgguc

SEQ ID NO: 1283 - RNA, 19 nt, Artificial Sequence
  Synthetic
ucugagccucucucgguca

SEQ ID NO: 1284 - RNA, 19 nt, Artificial Sequence
  Synthetic
cugagccucucucggucaa

SEQ ID NO: 1285 - RNA, 19 nt, Artificial Sequence
  Synthetic
ugagccucucucggucaac

SEQ ID NO: 1286 - RNA, 19 nt, Artificial Sequence
  Synthetic
gagccucucucggucaaca

SEQ ID NO: 1287 - RNA, 19 nt, Artificial Sequence
  Synthetic
agccucucucggucaacag

SEQ ID NO: 1288 - RNA, 19 nt, Artificial Sequence
  Synthetic
gccucucucggucaacagc

SEQ ID NO: 1289 - RNA, 19 nt, Artificial Sequence
  Synthetic
ccucucucggucaacagca

SEQ ID NO: 1290 - RNA, 19 nt, Artificial Sequence
  Synthetic
cucucucggucaacagcaa

SEQ ID NO: 1291 - RNA, 19 nt, Artificial Sequence
  Synthetic
ucucucggucaacagcaaa

SEQ ID NO: 1292 - RNA, 19 nt, Artificial Sequence
  Synthetic
cucucggucaacagcaaag

SEQ ID NO: 1293 - RNA, 19 nt, Artificial Sequence
  Synthetic
uguguuuugucugagccuu

SEQ ID NO: 1294 - RNA, 19 nt, Artificial Sequence
  Synthetic
guguuuugucugagccuuu

SEQ ID NO: 1295 - RNA, 19 nt, Artificial Sequence
  Synthetic
uguuuugucugagccuuuc

SEQ ID NO: 1296 - RNA, 19 nt, Artificial Sequence
  Synthetic
guuuugucugagccuuucu

SEQ ID NO: 1297 - RNA, 19 nt, Artificial Sequence
  Synthetic
ucucggucaacagcaaagc

SEQ ID NO: 1298 - RNA, 19 nt, Artificial Sequence
  Synthetic
cucggucaacagcaaagcu

SEQ ID NO: 1299 - RNA, 19 nt, Artificial Sequence
  Synthetic
ucggucaacagcaaagcuu

SEQ ID NO: 1300 - RNA, 19 nt, Artificial Sequence
  Synthetic
cggucaacagcaaagcuug

SEQ ID NO: 1301 - RNA, 19 nt, Artificial Sequence
  Synthetic
uuuugucugagccucucuu

SEQ ID NO: 1302 - RNA, 19 nt, Artificial Sequence
  Synthetic
uuugucugagccucucuug

SEQ ID NO: 1303 - RNA, 19 nt, Artificial Sequence
  Synthetic
uugucugagccucucuugg

SEQ ID NO: 1304 - RNA, 19 nt, Artificial Sequence
  Synthetic
ugucugagccucucuuggu

SEQ ID NO: 1305 - RNA, 19 nt, Artificial Sequence
  Synthetic
gucugagccucucuugguc

SEQ ID NO: 1306 - RNA, 19 nt, Artificial Sequence
  Synthetic
ucugagccucucuugguca

SEQ ID NO: 1307 - RNA, 19 nt, Artificial Sequence
  Synthetic
cugagccucucuuggucaa

SEQ ID NO: 1308 - RNA, 19 nt, Artificial Sequence
  Synthetic
ugagccucucuuggucaac

SEQ ID NO: 1309 - RNA, 19 nt, Artificial Sequence
  Synthetic
gagccucucuuggucaaca

SEQ ID NO: 1310 - RNA, 19 nt, Artificial Sequence
  Synthetic
agccucucuuggucaacag

SEQ ID NO: 1311 - RNA, 19 nt, Artificial Sequence
  Synthetic
gccucucuuggucaacagc

SEQ ID NO: 1312 - RNA, 19 nt, Artificial Sequence
  Synthetic
ccucucuuggucaacagca

SEQ ID NO: 1313 - RNA, 19 nt, Artificial Sequence
  Synthetic
cucucuuggucaacagcaa

SEQ ID NO: 1314 - RNA, 19 nt, Artificial Sequence
  Synthetic
ucucuuggucaacagcaaa

SEQ ID NO: 1315 - RNA, 19 nt, Artificial Sequence
  Synthetic
cucuuggucaacagcaaag

SEQ ID NO: 1316 - RNA, 19 nt, Artificial Sequence
  Synthetic
ucuuggucaacagcaaagc

SEQ ID NO: 1317 - RNA, 19 nt, Artificial Sequence
  Synthetic
cuuggucaacagcaaagcu

SEQ ID NO: 1318 - RNA, 19 nt, Artificial Sequence
  Synthetic
uuggucaacagcaaagcuu

SEQ ID NO: 1319 - RNA, 19 nt, Artificial Sequence
  Synthetic
uggucaacagcaaagcuug

SEQ ID NO: 1320 - RNA, 19 nt, Artificial Sequence
  Synthetic
cagcugacaucuugcacgg

SEQ ID NO: 1321 - RNA, 19 nt, Artificial Sequence
  Synthetic
agcugacaucuugcacggu

SEQ ID NO: 1322 - RNA, 19 nt, Artificial Sequence
  Synthetic
gcugacaucuugcacggug

SEQ ID NO: 1323 - RNA, 19 nt, Artificial Sequence
  Synthetic
cugacaucuugcacgguga

SEQ ID NO: 1324 - RNA, 19 nt, Artificial Sequence
  Synthetic
ugacaucuugcacggugac

SEQ ID NO: 1325 - RNA, 19 nt, Artificial Sequence
  Synthetic
gacaucuugcacggugacc

SEQ ID NO: 1326 - RNA, 19 nt, Artificial Sequence
  Synthetic
acaucuugcacggugaccc

SEQ ID NO: 1327 - RNA, 19 nt, Artificial Sequence
  Synthetic
caucuugcacggugacccc

SEQ ID NO: 1328 - RNA, 19 nt, Artificial Sequence
  Synthetic
aucuugcacggugaccccu

SEQ ID NO: 1329 - RNA, 19 nt, Artificial Sequence
  Synthetic
ucuugcacggugaccccuu

SEQ ID NO: 1330 - RNA, 19 nt, Artificial Sequence
  Synthetic
cuugcacggugaccccuuu

SEQ ID NO: 1331 - RNA, 19 nt, Artificial Sequence
  Synthetic
uugcacggugaccccuuuu

SEQ ID NO: 1332 - RNA, 19 nt, Artificial Sequence
  Synthetic
ugcacggugaccccuuuua

SEQ ID NO: 1333 - RNA, 19 nt, Artificial Sequence
  Synthetic
gcacggugaccccuuuuag

SEQ ID NO: 1334 - RNA, 19 nt, Artificial Sequence
  Synthetic
cacggugaccccuuuuagu

SEQ ID NO: 1335 - RNA, 19 nt, Artificial Sequence
  Synthetic
acggugaccccuuuuaguc

SEQ ID NO: 1336 - RNA, 19 nt, Artificial Sequence
  Synthetic
cggugaccccuuuuaguca

SEQ ID NO: 1337 - RNA, 19 nt, Artificial Sequence
  Synthetic
ggugaccccuuuuagucag

SEQ ID NO: 1338 - RNA, 19 nt, Artificial Sequence
  Synthetic
gugaccccuuuuagucagg

SEQ ID NO: 1339 - RNA, 19 nt, Artificial Sequence
  Synthetic
cagcugacaucuugcacgu

SEQ ID NO: 1340 - RNA, 19 nt, Artificial Sequence
  Synthetic
agcugacaucuugcacguu

SEQ ID NO: 1341 - RNA, 19 nt, Artificial Sequence
  Synthetic
gcugacaucuugcacguug

SEQ ID NO: 1342 - RNA, 19 nt, Artificial Sequence
  Synthetic
cugacaucuugcacguuga

SEQ ID NO: 1343 - RNA, 19 nt, Artificial Sequence
  Synthetic
ugacaucuugcacguugac

SEQ ID NO: 1344 - RNA, 19 nt, Artificial Sequence
  Synthetic
gacaucuugcacguugacc

SEQ ID NO: 1345 - RNA, 19 nt, Artificial Sequence
  Synthetic
acaucuugcacguugaccc

SEQ ID NO: 1346 - RNA, 19 nt, Artificial Sequence
  Synthetic
caucuugcacguugacccc

SEQ ID NO: 1347 - RNA, 19 nt, Artificial Sequence
  Synthetic
aucuugcacguugaccccu

SEQ ID NO: 1348 - RNA, 19 nt, Artificial Sequence
  Synthetic
ucuugcacguugaccccuu

SEQ ID NO: 1349 - RNA, 19 nt, Artificial Sequence
  Synthetic
cuugcacguugaccccuuu

SEQ ID NO: 1350 - RNA, 19 nt, Artificial Sequence
  Synthetic
uugcacguugaccccuuuu

SEQ ID NO: 1351 - RNA, 19 nt, Artificial Sequence
  Synthetic
ugcacguugaccccuuuua

SEQ ID NO: 1352 - RNA, 19 nt, Artificial Sequence
  Synthetic
gcacguugaccccuuuuag

SEQ ID NO: 1353 - RNA, 19 nt, Artificial Sequence
  Synthetic
cacguugaccccuuuuagu

SEQ ID NO: 1354 - RNA, 19 nt, Artificial Sequence
  Synthetic
acguugaccccuuuuaguc

SEQ ID NO: 1355 - RNA, 19 nt, Artificial Sequence
  Synthetic
cguugaccccuuuuaguca

SEQ ID NO: 1356 - RNA, 19 nt, Artificial Sequence
  Synthetic
guugaccccuuuuagucag

SEQ ID NO: 1357 - RNA, 19 nt, Artificial Sequence
  Synthetic
uugaccccuuuuagucagg

SEQ ID NO: 1358 - RNA, 19 nt, Artificial Sequence
  Synthetic
uuugggagcucugcuugcc

SEQ ID NO: 1359 - RNA, 19 nt, Artificial Sequence
  Synthetic
uugggagcucugcuugccg

SEQ ID NO: 1360 - RNA, 19 nt, Artificial Sequence
  Synthetic
ugggagcucugcuugccga

SEQ ID NO: 1361 - RNA, 19 nt, Artificial Sequence
  Synthetic
gggagcucugcuugccgac

SEQ ID NO: 1362 - RNA, 19 nt, Artificial Sequence
  Synthetic
ggagcucugcuugccgacu

SEQ ID NO: 1363 - RNA, 19 nt, Artificial Sequence
  Synthetic
gagcucugcuugccgacug

SEQ ID NO: 1364 - RNA, 19 nt, Artificial Sequence
  Synthetic
agcucugcuugccgacugg

SEQ ID NO: 1365 - RNA, 19 nt, Artificial Sequence
  Synthetic
gcucugcuugccgacuggc

SEQ ID NO: 1366 - RNA, 19 nt, Artificial Sequence
  Synthetic
cucugcuugccgacuggcu

SEQ ID NO: 1367 - RNA, 19 nt, Artificial Sequence
  Synthetic
ucugcuugccgacuggcug

SEQ ID NO: 1368 - RNA, 19 nt, Artificial Sequence
  Synthetic
cugcuugccgacuggcugu

SEQ ID NO: 1369 - RNA, 19 nt, Artificial Sequence
  Synthetic
ugcuugccgacuggcugug

SEQ ID NO: 1370 - RNA, 19 nt, Artificial Sequence
  Synthetic
gcuugccgacuggcuguga

SEQ ID NO: 1371 - RNA, 19 nt, Artificial Sequence
  Synthetic
cuugccgacuggcugugag

SEQ ID NO: 1372 - RNA, 19 nt, Artificial Sequence
  Synthetic
uugccgacuggcugugaga

SEQ ID NO: 1373 - RNA, 19 nt, Artificial Sequence
  Synthetic
ugccgacuggcugugagac

SEQ ID NO: 1374 - RNA, 19 nt, Artificial Sequence
  Synthetic
gccgacuggcugugagacg

SEQ ID NO: 1375 - RNA, 19 nt, Artificial Sequence
  Synthetic
ccgacuggcugugagacga

SEQ ID NO: 1376 - RNA, 19 nt, Artificial Sequence
  Synthetic
cgacuggcugugagacgag

SEQ ID NO: 1377 - RNA, 19 nt, Artificial Sequence
  Synthetic
uuugggagcucugcuugcu

SEQ ID NO: 1378 - RNA, 19 nt, Artificial Sequence
  Synthetic
uugggagcucugcuugcug

SEQ ID NO: 1379 - RNA, 19 nt, Artificial Sequence
  Synthetic
ugggagcucugcuugcuga

SEQ ID NO: 1380 - RNA, 19 nt, Artificial Sequence
  Synthetic
gggagcucugcuugcugac

SEQ ID NO: 1381 - RNA, 19 nt, Artificial Sequence
  Synthetic
ggagcucugcuugcugacu

SEQ ID NO: 1382 - RNA, 19 nt, Artificial Sequence
  Synthetic
gagcucugcuugcugacug

SEQ ID NO: 1383 - RNA, 19 nt, Artificial Sequence
  Synthetic
agcucugcuugcugacugg

SEQ ID NO: 1384 - RNA, 19 nt, Artificial Sequence
  Synthetic
gcucugcuugcugacuggc

SEQ ID NO: 1385 - RNA, 19 nt, Artificial Sequence
  Synthetic
cucugcuugcugacuggcu

SEQ ID NO: 1386 - RNA, 19 nt, Artificial Sequence
  Synthetic
ucugcuugcugacuggcug

SEQ ID NO: 1387 - RNA, 19 nt, Artificial Sequence
  Synthetic
cugcuugcugacuggcugu

SEQ ID NO: 1388 - RNA, 19 nt, Artificial Sequence
  Synthetic
ugcuugcugacuggcugug

SEQ ID NO: 1389 - RNA, 19 nt, Artificial Sequence
  Synthetic
gcuugcugacuggcuguga

SEQ ID NO: 1390 - RNA, 19 nt, Artificial Sequence
  Synthetic
cuugcugacuggcugugag

SEQ ID NO: 1391 - RNA, 19 nt, Artificial Sequence
  Synthetic
uugcugacuggcugugaga

SEQ ID NO: 1392 - RNA, 19 nt, Artificial Sequence
  Synthetic
ugcugacuggcugugagac

SEQ ID NO: 1393 - RNA, 19 nt, Artificial Sequence
  Synthetic
gcugacuggcugugagacg

SEQ ID NO: 1394 - RNA, 19 nt, Artificial Sequence
  Synthetic
cugacuggcugugagacga

SEQ ID NO: 1395 - RNA, 19 nt, Artificial Sequence
  Synthetic
ugacuggcugugagacgag

SEQ ID NO: 1396 - RNA, 19 nt, Artificial Sequence
  Synthetic
uggcagcuggggagcagcu

SEQ ID NO: 1397 - RNA, 19 nt, Artificial Sequence
  Synthetic
ggcagcuggggagcagcug

SEQ ID NO: 1398 - RNA, 19 nt, Artificial Sequence
  Synthetic
gcagcuggggagcagcuga

SEQ ID NO: 1399 - RNA, 19 nt, Artificial Sequence
  Synthetic
cagcuggggagcagcugag

SEQ ID NO: 1400 - RNA, 19 nt, Artificial Sequence
  Synthetic
agcuggggagcagcugaga

SEQ ID NO: 1401 - RNA, 19 nt, Artificial Sequence
  Synthetic
gcuggggagcagcugagau

SEQ ID NO: 1402 - RNA, 19 nt, Artificial Sequence
  Synthetic
cuggggagcagcugagaug

SEQ ID NO: 1403 - RNA, 19 nt, Artificial Sequence
  Synthetic
uggggagcagcugagaugu

SEQ ID NO: 1404 - RNA, 19 nt, Artificial Sequence
  Synthetic
ggggagcagcugagaugug

SEQ ID NO: 1405 - RNA, 19 nt, Artificial Sequence
  Synthetic
gggagcagcugagaugugg

SEQ ID NO: 1406 - RNA, 19 nt, Artificial Sequence
  Synthetic
ggagcagcugagaugugga

SEQ ID NO: 1407 - RNA, 19 nt, Artificial Sequence
  Synthetic
gagcagcugagauguggac

SEQ ID NO: 1408 - RNA, 19 nt, Artificial Sequence
  Synthetic
agcagcugagauguggacu

SEQ ID NO: 1409 - RNA, 19 nt, Artificial Sequence
  Synthetic
gcagcugagauguggacuu

SEQ ID NO: 1410 - RNA, 19 nt, Artificial Sequence
  Synthetic
cagcugagauguggacuug

SEQ ID NO: 1411 - RNA, 19 nt, Artificial Sequence
  Synthetic
agcugagauguggacuugu

SEQ ID NO: 1412 - RNA, 19 nt, Artificial Sequence
  Synthetic
gcugagauguggacuugua

SEQ ID NO: 1413 - RNA, 19 nt, Artificial Sequence
  Synthetic
cugagauguggacuuguau

SEQ ID NO: 1414 - RNA, 19 nt, Artificial Sequence
  Synthetic
ugagauguggacuuguaug

SEQ ID NO: 1415 - RNA, 19 nt, Artificial Sequence
  Synthetic
uggcagcuggggagcagcg

SEQ ID NO: 1416 - RNA, 19 nt, Artificial Sequence
  Synthetic
ggcagcuggggagcagcgg

SEQ ID NO: 1417 - RNA, 19 nt, Artificial Sequence
  Synthetic
gcagcuggggagcagcgga

SEQ ID NO: 1418 - RNA, 19 nt, Artificial Sequence
  Synthetic
cagcuggggagcagcggag

SEQ ID NO: 1419 - RNA, 19 nt, Artificial Sequence
  Synthetic
agcuggggagcagcggaga

SEQ ID NO: 1420 - RNA, 19 nt, Artificial Sequence
  Synthetic
gcuggggagcagcggagau

SEQ ID NO: 1421 - RNA, 19 nt, Artificial Sequence
  Synthetic
cuggggagcagcggagaug

SEQ ID NO: 1422 - RNA, 19 nt, Artificial Sequence
  Synthetic
uggggagcagcggagaugu

SEQ ID NO: 1423 - RNA, 19 nt, Artificial Sequence
  Synthetic
ggggagcagcggagaugug

SEQ ID NO: 1424 - RNA, 19 nt, Artificial Sequence
  Synthetic
gggagcagcggagaugugg

SEQ ID NO: 1425 - RNA, 19 nt, Artificial Sequence
  Synthetic
ggagcagcggagaugugga

SEQ ID NO: 1426 - RNA, 19 nt, Artificial Sequence
  Synthetic
gagcagcggagauguggac

SEQ ID NO: 1427 - RNA, 19 nt, Artificial Sequence
  Synthetic
agcagcggagauguggacu

SEQ ID NO: 1428 - RNA, 19 nt, Artificial Sequence
  Synthetic
gcagcggagauguggacuu

SEQ ID NO: 1429 - RNA, 19 nt, Artificial Sequence
  Synthetic
cagcggagauguggacuug

SEQ ID NO: 1430 - RNA, 19 nt, Artificial Sequence
  Synthetic
agcggagauguggacuugu

SEQ ID NO: 1431 - RNA, 19 nt, Artificial Sequence
  Synthetic
gcggagauguggacuugua

SEQ ID NO: 1432 - RNA, 19 nt, Artificial Sequence
  Synthetic
cggagauguggacuuguau

SEQ ID NO: 1433 - RNA, 19 nt, Artificial Sequence
  Synthetic
ggagauguggacuuguaug

SEQ ID NO: 1434 - RNA, 19 nt, Artificial Sequence
  Synthetic
agcugaaagggagccccug

SEQ ID NO: 1435 - RNA, 19 nt, Artificial Sequence
  Synthetic
gcugaaagggagccccugc

SEQ ID NO: 1436 - RNA, 19 nt, Artificial Sequence
  Synthetic
cugaaagggagccccugcu

SEQ ID NO: 1437 - RNA, 19 nt, Artificial Sequence
  Synthetic
ugaaagggagccccugcuc

SEQ ID NO: 1438 - RNA, 19 nt, Artificial Sequence
  Synthetic
gaaagggagccccugcuca

SEQ ID NO: 1439 - RNA, 19 nt, Artificial Sequence
  Synthetic
aaagggagccccugcucaa

SEQ ID NO: 1440 - RNA, 19 nt, Artificial Sequence
  Synthetic
aagggagccccugcucaaa

SEQ ID NO: 1441 - RNA, 19 nt, Artificial Sequence
  Synthetic
agggagccccugcucaaag

SEQ ID NO: 1442 - RNA, 19 nt, Artificial Sequence
  Synthetic
gggagccccugcucaaagg

SEQ ID NO: 1443 - RNA, 19 nt, Artificial Sequence
  Synthetic
ggagccccugcucaaaggg

SEQ ID NO: 1444 - RNA, 19 nt, Artificial Sequence
  Synthetic
gagccccugcucaaaggga

SEQ ID NO: 1445 - RNA, 19 nt, Artificial Sequence
  Synthetic
agccccugcucaaagggag

SEQ ID NO: 1446 - RNA, 19 nt, Artificial Sequence
  Synthetic
gccccugcucaaagggagc

SEQ ID NO: 1447 - RNA, 19 nt, Artificial Sequence
  Synthetic
ccccugcucaaagggagcc

SEQ ID NO: 1448 - RNA, 19 nt, Artificial Sequence
  Synthetic
cccugcucaaagggagccc

SEQ ID NO: 1449 - RNA, 19 nt, Artificial Sequence
  Synthetic
ccugcucaaagggagcccc

SEQ ID NO: 1450 - RNA, 19 nt, Artificial Sequence
  Synthetic
cugcucaaagggagccccu

SEQ ID NO: 1451 - RNA, 19 nt, Artificial Sequence
  Synthetic
ugcucaaagggagccccuc

SEQ ID NO: 1452 - RNA, 19 nt, Artificial Sequence
  Synthetic
gcucaaagggagccccucc

SEQ ID NO: 1453 - RNA, 19 nt, Artificial Sequence
  Synthetic
cucaaagggagccccuccu

SEQ ID NO: 1454 - RNA, 19 nt, Artificial Sequence
  Synthetic
ucaaagggagccccuccuc

SEQ ID NO: 1455 - RNA, 19 nt, Artificial Sequence
  Synthetic
caaagggagccccuccucu

SEQ ID NO: 1456 - RNA, 19 nt, Artificial Sequence
  Synthetic
agcugaaagggagccccuc

SEQ ID NO: 1457 - RNA, 19 nt, Artificial Sequence
  Synthetic
gcugaaagggagccccucc

SEQ ID NO: 1458 - RNA, 19 nt, Artificial Sequence
  Synthetic
cugaaagggagccccuccu

SEQ ID NO: 1459 - RNA, 19 nt, Artificial Sequence
  Synthetic
ugaaagggagccccuccuc

SEQ ID NO: 1460 - RNA, 19 nt, Artificial Sequence
  Synthetic
gaaagggagccccuccucu

SEQ ID NO: 1461 - RNA, 19 nt, Artificial Sequence
  Synthetic
guaagaaaaucaccauucu

SEQ ID NO: 1462 - RNA, 19 nt, Artificial Sequence
  Synthetic
uaagaaaaucaccauucuu

SEQ ID NO: 1463 - RNA, 19 nt, Artificial Sequence
  Synthetic
aagaaaaucaccauucuuc

SEQ ID NO: 1464 - RNA, 19 nt, Artificial Sequence
  Synthetic
agaaaaucaccauucuucc

SEQ ID NO: 1465 - RNA, 19 nt, Artificial Sequence
  Synthetic
gaaaaucaccauucuuccg

SEQ ID NO: 1466 - RNA, 19 nt, Artificial Sequence
  Synthetic
aaaaucaccauucuuccgu

SEQ ID NO: 1467 - RNA, 19 nt, Artificial Sequence
  Synthetic
aaaucaccauucuuccgua

SEQ ID NO: 1468 - RNA, 19 nt, Artificial Sequence
  Synthetic
aaucaccauucuuccguau

SEQ ID NO: 1469 - RNA, 19 nt, Artificial Sequence
  Synthetic
aucaccauucuuccguauu

SEQ ID NO: 1470 - RNA, 19 nt, Artificial Sequence
  Synthetic
ucaccauucuuccguauug

SEQ ID NO: 1471 - RNA, 19 nt, Artificial Sequence
  Synthetic
caccauucuuccguauugg

SEQ ID NO: 1472 - RNA, 19 nt, Artificial Sequence
  Synthetic
accauucuuccguauuggu

SEQ ID NO: 1473 - RNA, 19 nt, Artificial Sequence
  Synthetic
ccauucuuccguauugguu

SEQ ID NO: 1474 - RNA, 19 nt, Artificial Sequence
  Synthetic
cauucuuccguauugguug

SEQ ID NO: 1475 - RNA, 19 nt, Artificial Sequence
  Synthetic
auucuuccguauugguugg

SEQ ID NO: 1476 - RNA, 19 nt, Artificial Sequence
  Synthetic
uucuuccguauugguuggg

SEQ ID NO: 1477 - RNA, 19 nt, Artificial Sequence
  Synthetic
guaagaaaaucaccauucc

SEQ ID NO: 1478 - RNA, 19 nt, Artificial Sequence
  Synthetic
uaagaaaaucaccauuccg

SEQ ID NO: 1479 - RNA, 19 nt, Artificial Sequence
  Synthetic
aagaaaaucaccauuccgu

SEQ ID NO: 1480 - RNA, 19 nt, Artificial Sequence
  Synthetic
agaaaaucaccauuccgua

SEQ ID NO: 1481 - RNA, 19 nt, Artificial Sequence
  Synthetic
gaaaaucaccauuccguau

SEQ ID NO: 1482 - RNA, 19 nt, Artificial Sequence
  Synthetic
aaaaucaccauuccguauu

SEQ ID NO: 1483 - RNA, 19 nt, Artificial Sequence
  Synthetic
aaaucaccauuccguauug

SEQ ID NO: 1484 - RNA, 19 nt, Artificial Sequence
  Synthetic
aaucaccauuccguauugg

SEQ ID NO: 1485 - RNA, 19 nt, Artificial Sequence
  Synthetic
aucaccauuccguauuggu

SEQ ID NO: 1486 - RNA, 19 nt, Artificial Sequence
  Synthetic
ucaccauuccguauugguu

SEQ ID NO: 1487 - RNA, 19 nt, Artificial Sequence
  Synthetic
caccauuccguauugguug

SEQ ID NO: 1488 - RNA, 19 nt, Artificial Sequence
  Synthetic
accauuccguauugguugg

SEQ ID NO: 1489 - RNA, 19 nt, Artificial Sequence
  Synthetic
ccauuccguauugguuggg

SEQ ID NO: 1490 - RNA, 19 nt, Artificial Sequence
  Synthetic
aaguucucagaacuguugc

SEQ ID NO: 1491 - RNA, 19 nt, Artificial Sequence
  Synthetic
aguucucagaacuguugcu

SEQ ID NO: 1492 - RNA, 19 nt, Artificial Sequence
  Synthetic
guucucagaacuguugcug

SEQ ID NO: 1493 - RNA, 19 nt, Artificial Sequence
  Synthetic
uucucagaacuguugcugc

SEQ ID NO: 1494 - RNA, 19 nt, Artificial Sequence
  Synthetic
ucucagaacuguugcugcu

SEQ ID NO: 1495 - RNA, 19 nt, Artificial Sequence
  Synthetic
cucagaacuguugcugcuc

SEQ ID NO: 1496 - RNA, 19 nt, Artificial Sequence
  Synthetic
ucagaacuguugcugcucc

SEQ ID NO: 1497 - RNA, 19 nt, Artificial Sequence
  Synthetic
cagaacuguugcugcuccc

SEQ ID NO: 1498 - RNA, 19 nt, Artificial Sequence
  Synthetic
agaacuguugcugcucccc

SEQ ID NO: 1499 - RNA, 19 nt, Artificial Sequence
  Synthetic
gaacuguugcugcucccca

SEQ ID NO: 1500 - RNA, 19 nt, Artificial Sequence
  Synthetic
aacuguugcugcuccccac

SEQ ID NO: 1501 - RNA, 19 nt, Artificial Sequence
  Synthetic
acuguugcugcuccccacc

SEQ ID NO: 1502 - RNA, 19 nt, Artificial Sequence
  Synthetic
cuguugcugcuccccaccc

SEQ ID NO: 1503 - RNA, 19 nt, Artificial Sequence
  Synthetic
uguugcugcuccccacccg

SEQ ID NO: 1504 - RNA, 19 nt, Artificial Sequence
  Synthetic
guugcugcuccccacccgc

SEQ ID NO: 1505 - RNA, 19 nt, Artificial Sequence
  Synthetic
uugcugcuccccacccgcc

SEQ ID NO: 1506 - RNA, 19 nt, Artificial Sequence
  Synthetic
ugcugcuccccacccgccu

SEQ ID NO: 1507 - RNA, 19 nt, Artificial Sequence
  Synthetic
aaguucucagaacuguugg

SEQ ID NO: 1508 - RNA, 19 nt, Artificial Sequence
  Synthetic
aguucucagaacuguuggc

SEQ ID NO: 1509 - RNA, 19 nt, Artificial Sequence
  Synthetic
guucucagaacuguuggcu

SEQ ID NO: 1510 - RNA, 19 nt, Artificial Sequence
  Synthetic
uucucagaacuguuggcug

SEQ ID NO: 1511 - RNA, 19 nt, Artificial Sequence
  Synthetic
ucucagaacuguuggcugc

SEQ ID NO: 1512 - RNA, 19 nt, Artificial Sequence
  Synthetic
cucagaacuguuggcugcu

SEQ ID NO: 1513 - RNA, 19 nt, Artificial Sequence
  Synthetic
ucagaacuguuggcugcuc

SEQ ID NO: 1514 - RNA, 19 nt, Artificial Sequence
  Synthetic
cagaacuguuggcugcucc

SEQ ID NO: 1515 - RNA, 19 nt, Artificial Sequence
  Synthetic
agaacuguuggcugcuccc

SEQ ID NO: 1516 - RNA, 19 nt, Artificial Sequence
  Synthetic
gaacuguuggcugcucccc

SEQ ID NO: 1517 - RNA, 19 nt, Artificial Sequence
  Synthetic
aacuguuggcugcucccca

SEQ ID NO: 1518 - RNA, 19 nt, Artificial Sequence
  Synthetic
acuguuggcugcuccccac

SEQ ID NO: 1519 - RNA, 19 nt, Artificial Sequence
  Synthetic
cuguuggcugcuccccacc

SEQ ID NO: 1520 - RNA, 19 nt, Artificial Sequence
  Synthetic
uguuggcugcuccccaccc

SEQ ID NO: 1521 - RNA, 19 nt, Artificial Sequence
  Synthetic
guuggcugcuccccacccg

SEQ ID NO: 1522 - RNA, 19 nt, Artificial Sequence
  Synthetic
uuggcugcuccccacccgc

SEQ ID NO: 1523 - RNA, 19 nt, Artificial Sequence
  Synthetic
uggcugcuccccacccgcc

SEQ ID NO: 1524 - RNA, 19 nt, Artificial Sequence
  Synthetic
ggcugcuccccacccgccu

SEQ ID NO: 1525 - RNA, 19 nt, Artificial Sequence
  Synthetic
agauguuuacauuuguaag

SEQ ID NO: 1526 - RNA, 19 nt, Artificial Sequence
  Synthetic
gauguuuacauuuguaaga

SEQ ID NO: 1527 - RNA, 19 nt, Artificial Sequence
  Synthetic
auguuuacauuuguaagaa

SEQ ID NO: 1528 - RNA, 19 nt, Artificial Sequence
  Synthetic
uguuuacauuuguaagaaa

SEQ ID NO: 1529 - RNA, 19 nt, Artificial Sequence
  Synthetic
guuuacauuuguaagaaau

SEQ ID NO: 1530 - RNA, 19 nt, Artificial Sequence
  Synthetic
uuuacauuuguaagaaaua

SEQ ID NO: 1531 - RNA, 19 nt, Artificial Sequence
  Synthetic
uuacauuuguaagaaauaa

SEQ ID NO: 1532 - RNA, 19 nt, Artificial Sequence
  Synthetic
uacauuuguaagaaauaac

SEQ ID NO: 1533 - RNA, 19 nt, Artificial Sequence
  Synthetic
acauuuguaagaaauaaca

SEQ ID NO: 1534 - RNA, 19 nt, Artificial Sequence
  Synthetic
cauuuguaagaaauaacac

SEQ ID NO: 1535 - RNA, 19 nt, Artificial Sequence
  Synthetic
auuuguaagaaauaacacu

SEQ ID NO: 1536 - RNA, 19 nt, Artificial Sequence
  Synthetic
uuuguaagaaauaacacug

SEQ ID NO: 1537 - RNA, 19 nt, Artificial Sequence
  Synthetic
uuguaagaaauaacacugu

SEQ ID NO: 1538 - RNA, 19 nt, Artificial Sequence
  Synthetic
uguaagaaauaacacugug

SEQ ID NO: 1539 - RNA, 19 nt, Artificial Sequence
  Synthetic
guaagaaauaacacuguga

SEQ ID NO: 1540 - RNA, 19 nt, Artificial Sequence
  Synthetic
uaagaaauaacacugugaa

SEQ ID NO: 1541 - RNA, 19 nt, Artificial Sequence
  Synthetic
aagaaauaacacugugaau

SEQ ID NO: 1542 - RNA, 19 nt, Artificial Sequence
  Synthetic
agaaauaacacugugaaug

SEQ ID NO: 1543 - RNA, 19 nt, Artificial Sequence
  Synthetic
gaaauaacacugugaaugu

SEQ ID NO: 1544 - RNA, 19 nt, Artificial Sequence
  Synthetic
agauguuuacauuuguaaa

SEQ ID NO: 1545 - RNA, 19 nt, Artificial Sequence
  Synthetic
gauguuuacauuuguaaaa

SEQ ID NO: 1546 - RNA, 19 nt, Artificial Sequence
  Synthetic
auguuuacauuuguaaaaa

SEQ ID NO: 1547 - RNA, 19 nt, Artificial Sequence
  Synthetic
uguuuacauuuguaaaaaa

SEQ ID NO: 1548 - RNA, 19 nt, Artificial Sequence
  Synthetic
guuuacauuuguaaaaaau

SEQ ID NO: 1549 - RNA, 19 nt, Artificial Sequence
  Synthetic
uuuacauuuguaaaaaaua

SEQ ID NO: 1550 - RNA, 19 nt, Artificial Sequence
  Synthetic
uuacauuuguaaaaaauaa

SEQ ID NO: 1551 - RNA, 19 nt, Artificial Sequence
  Synthetic
uacauuuguaaaaaauaac

SEQ ID NO: 1552 - RNA, 19 nt, Artificial Sequence
  Synthetic
acauuuguaaaaaauaaca

SEQ ID NO: 1553 - RNA, 19 nt, Artificial Sequence
  Synthetic
cauuuguaaaaaauaacac

SEQ ID NO: 1554 - RNA, 19 nt, Artificial Sequence
  Synthetic
auuuguaaaaaauaacacu

SEQ ID NO: 1555 - RNA, 19 nt, Artificial Sequence
  Synthetic
uuuguaaaaaauaacacug

SEQ ID NO: 1556 - RNA, 19 nt, Artificial Sequence
  Synthetic
uuguaaaaaauaacacugu

SEQ ID NO: 1557 - RNA, 19 nt, Artificial Sequence
  Synthetic
uguaaaaaauaacacugug

SEQ ID NO: 1558 - RNA, 19 nt, Artificial Sequence
  Synthetic
guaaaaaauaacacuguga

SEQ ID NO: 1559 - RNA, 19 nt, Artificial Sequence
  Synthetic
uaaaaaauaacacugugaa

SEQ ID NO: 1560 - RNA, 19 nt, Artificial Sequence
  Synthetic
aaaaaauaacacugugaau

SEQ ID NO: 1561 - RNA, 19 nt, Artificial Sequence
  Synthetic
aaaaauaacacugugaaug

SEQ ID NO: 1562 - RNA, 19 nt, Artificial Sequence
  Synthetic
aaaauaacacugugaaugu

SEQ ID NO: 1563 - RNA, 19 nt, Artificial Sequence
  Synthetic
acccucauuucugccagcg

SEQ ID NO: 1564 - RNA, 19 nt, Artificial Sequence
  Synthetic
cccucauuucugccagcgc

SEQ ID NO: 1565 - RNA, 19 nt, Artificial Sequence
  Synthetic
ccucauuucugccagcgca

SEQ ID NO: 1566 - RNA, 19 nt, Artificial Sequence
  Synthetic
cucauuucugccagcgcau

SEQ ID NO: 1567 - RNA, 19 nt, Artificial Sequence
  Synthetic
ucauuucugccagcgcaug

SEQ ID NO: 1568 - RNA, 19 nt, Artificial Sequence
  Synthetic
cauuucugccagcgcaugu

SEQ ID NO: 1569 - RNA, 19 nt, Artificial Sequence
  Synthetic
auuucugccagcgcaugug

SEQ ID NO: 1570 - RNA, 19 nt, Artificial Sequence
  Synthetic
uuucugccagcgcaugugu

SEQ ID NO: 1571 - RNA, 19 nt, Artificial Sequence
  Synthetic
uucugccagcgcauguguc

SEQ ID NO: 1572 - RNA, 19 nt, Artificial Sequence
  Synthetic
ucugccagcgcaugugucc

SEQ ID NO: 1573 - RNA, 19 nt, Artificial Sequence
  Synthetic
cugccagcgcauguguccu

SEQ ID NO: 1574 - RNA, 19 nt, Artificial Sequence
  Synthetic
ugccagcgcauguguccuu

SEQ ID NO: 1575 - RNA, 19 nt, Artificial Sequence
  Synthetic
gccagcgcauguguccuuu

SEQ ID NO: 1576 - RNA, 19 nt, Artificial Sequence
  Synthetic
ccagcgcauguguccuuuc

SEQ ID NO: 1577 - RNA, 19 nt, Artificial Sequence
  Synthetic
cagcgcauguguccuuuca

SEQ ID NO: 1578 - RNA, 19 nt, Artificial Sequence
  Synthetic
agcgcauguguccuuucaa

SEQ ID NO: 1579 - RNA, 19 nt, Artificial Sequence
  Synthetic
gcgcauguguccuuucaag

SEQ ID NO: 1580 - RNA, 19 nt, Artificial Sequence
  Synthetic
cgcauguguccuuucaagg

SEQ ID NO: 1581 - RNA, 19 nt, Artificial Sequence
  Synthetic
gcauguguccuuucaaggg

SEQ ID NO: 1582 - RNA, 19 nt, Artificial Sequence
  Synthetic
acccucauuucugccagca

SEQ ID NO: 1583 - RNA, 19 nt, Artificial Sequence
  Synthetic
cccucauuucugccagcac

SEQ ID NO: 1584 - RNA, 19 nt, Artificial Sequence
  Synthetic
ccucauuucugccagcaca

SEQ ID NO: 1585 - RNA, 19 nt, Artificial Sequence
  Synthetic
cucauuucugccagcacau

SEQ ID NO: 1586 - RNA, 19 nt, Artificial Sequence
  Synthetic
ucauuucugccagcacaug

SEQ ID NO: 1587 - RNA, 19 nt, Artificial Sequence
  Synthetic
cauuucugccagcacaugu

SEQ ID NO: 1588 - RNA, 19 nt, Artificial Sequence
  Synthetic
auuucugccagcacaugug

SEQ ID NO: 1589 - RNA, 19 nt, Artificial Sequence
  Synthetic
uuucugccagcacaugugu

SEQ ID NO: 1590 - RNA, 19 nt, Artificial Sequence
  Synthetic
uucugccagcacauguguc

SEQ ID NO: 1591 - RNA, 19 nt, Artificial Sequence
  Synthetic
ucugccagcacaugugucc

SEQ ID NO: 1592 - RNA, 19 nt, Artificial Sequence
  Synthetic
cugccagcacauguguccu

SEQ ID NO: 1593 - RNA, 19 nt, Artificial Sequence
  Synthetic
ugccagcacauguguccuu

SEQ ID NO: 1594 - RNA, 19 nt, Artificial Sequence
  Synthetic
gccagcacauguguccuuu

SEQ ID NO: 1595 - RNA, 19 nt, Artificial Sequence
  Synthetic
ccagcacauguguccuuuc

SEQ ID NO: 1596 - RNA, 19 nt, Artificial Sequence
  Synthetic
cagcacauguguccuuuca

SEQ ID NO: 1597 - RNA, 19 nt, Artificial Sequence
  Synthetic
agcacauguguccuuucaa

SEQ ID NO: 1598 - RNA, 19 nt, Artificial Sequence
  Synthetic
gcacauguguccuuucaag

SEQ ID NO: 1599 - RNA, 19 nt, Artificial Sequence
  Synthetic
cacauguguccuuucaagg

SEQ ID NO: 1600 - RNA, 19 nt, Artificial Sequence
  Synthetic
acauguguccuuucaaggg

SEQ ID NO: 1601 - RNA, 19 nt, Artificial Sequence
  Synthetic
cagguggaacuuccucccg

SEQ ID NO: 1602 - RNA, 19 nt, Artificial Sequence
  Synthetic
agguggaacuuccucccgu

SEQ ID NO: 1603 - RNA, 19 nt, Artificial Sequence
  Synthetic
gguggaacuuccucccguu

SEQ ID NO: 1604 - RNA, 19 nt, Artificial Sequence
  Synthetic
guggaacuuccucccguug

SEQ ID NO: 1605 - RNA, 19 nt, Artificial Sequence
  Synthetic
uggaacuuccucccguugc

SEQ ID NO: 1606 - RNA, 19 nt, Artificial Sequence
  Synthetic
ggaacuuccucccguugcg

SEQ ID NO: 1607 - RNA, 19 nt, Artificial Sequence
  Synthetic
gaacuuccucccguugcgg

SEQ ID NO: 1608 - RNA, 19 nt, Artificial Sequence
  Synthetic
aacuuccucccguugcggg

SEQ ID NO: 1609 - RNA, 19 nt, Artificial Sequence
  Synthetic
acuuccucccguugcgggg

SEQ ID NO: 1610 - RNA, 19 nt, Artificial Sequence
  Synthetic
cuuccucccguugcggggu

SEQ ID NO: 1611 - RNA, 19 nt, Artificial Sequence
  Synthetic
uuccucccguugcggggug

SEQ ID NO: 1612 - RNA, 19 nt, Artificial Sequence
  Synthetic
uccucccguugcggggugg

SEQ ID NO: 1613 - RNA, 19 nt, Artificial Sequence
  Synthetic
ccucccguugcggggugga

SEQ ID NO: 1614 - RNA, 19 nt, Artificial Sequence
  Synthetic
cucccguugcgggguggag

SEQ ID NO: 1615 - RNA, 19 nt, Artificial Sequence
  Synthetic
ucccguugcgggguggagu

SEQ ID NO: 1616 - RNA, 19 nt, Artificial Sequence
  Synthetic
cccguugcgggguggagug

SEQ ID NO: 1617 - RNA, 19 nt, Artificial Sequence
  Synthetic
ccguugcgggguggaguga

SEQ ID NO: 1618 - RNA, 19 nt, Artificial Sequence
  Synthetic
cguugcgggguggagugag

SEQ ID NO: 1619 - RNA, 19 nt, Artificial Sequence
  Synthetic
guugcgggguggagugagg

SEQ ID NO: 1620 - RNA, 19 nt, Artificial Sequence
  Synthetic
cagguggaacuuccuccca

SEQ ID NO: 1621 - RNA, 19 nt, Artificial Sequence
  Synthetic
agguggaacuuccucccau

SEQ ID NO: 1622 - RNA, 19 nt, Artificial Sequence
  Synthetic
gguggaacuuccucccauu

SEQ ID NO: 1623 - RNA, 19 nt, Artificial Sequence
  Synthetic
guggaacuuccucccauug

SEQ ID NO: 1624 - RNA, 19 nt, Artificial Sequence
  Synthetic
uggaacuuccucccauugc

SEQ ID NO: 1625 - RNA, 19 nt, Artificial Sequence
  Synthetic
ggaacuuccucccauugcg

SEQ ID NO: 1626 - RNA, 19 nt, Artificial Sequence
  Synthetic
gaacuuccucccauugcgg

SEQ ID NO: 1627 - RNA, 19 nt, Artificial Sequence
  Synthetic
aacuuccucccauugcggg

SEQ ID NO: 1628 - RNA, 19 nt, Artificial Sequence
  Synthetic
acuuccucccauugcgggg

SEQ ID NO: 1629 - RNA, 19 nt, Artificial Sequence
  Synthetic
cuuccucccauugcggggu

SEQ ID NO: 1630 - RNA, 19 nt, Artificial Sequence
  Synthetic
uuccucccauugcggggug

SEQ ID NO: 1631 - RNA, 19 nt, Artificial Sequence
  Synthetic
uccucccauugcggggugg

SEQ ID NO: 1632 - RNA, 19 nt, Artificial Sequence
  Synthetic
ccucccauugcggggugga

SEQ ID NO: 1633 - RNA, 19 nt, Artificial Sequence
  Synthetic
cucccauugcgggguggag

SEQ ID NO: 1634 - RNA, 19 nt, Artificial Sequence
  Synthetic
ucccauugcgggguggagu

SEQ ID NO: 1635 - RNA, 19 nt, Artificial Sequence
  Synthetic
cccauugcgggguggagug

SEQ ID NO: 1636 - RNA, 19 nt, Artificial Sequence
  Synthetic
ccauugcgggguggaguga

SEQ ID NO: 1637 - RNA, 19 nt, Artificial Sequence
  Synthetic
cauugcgggguggagugag

SEQ ID NO: 1638 - RNA, 19 nt, Artificial Sequence
  Synthetic
auugcgggguggagugagg

SEQ ID NO: 1639 - RNA, 19 nt, Artificial Sequence
  Synthetic
ccccgcuuccucccucugc

SEQ ID NO: 1640 - RNA, 19 nt, Artificial Sequence
  Synthetic
cccgcuuccucccucugcg

SEQ ID NO: 1641 - RNA, 19 nt, Artificial Sequence
  Synthetic
ccgcuuccucccucugcgg

SEQ ID NO: 1642 - RNA, 19 nt, Artificial Sequence
  Synthetic
cgcuuccucccucugcggg

SEQ ID NO: 1643 - RNA, 19 nt, Artificial Sequence
  Synthetic
gcuuccucccucugcgggg

SEQ ID NO: 1644 - RNA, 19 nt, Artificial Sequence
  Synthetic
cuuccucccucugcgggga

SEQ ID NO: 1645 - RNA, 19 nt, Artificial Sequence
  Synthetic
uuccucccucugcggggag

SEQ ID NO: 1646 - RNA, 19 nt, Artificial Sequence
  Synthetic
uccucccucugcggggagg

SEQ ID NO: 1647 - RNA, 19 nt, Artificial Sequence
  Synthetic
ccucccucugcggggagga

SEQ ID NO: 1648 - RNA, 19 nt, Artificial Sequence
  Synthetic
cucccucugcggggaggac

SEQ ID NO: 1649 - RNA, 19 nt, Artificial Sequence
  Synthetic
ucccucugcggggaggacc

SEQ ID NO: 1650 - RNA, 19 nt, Artificial Sequence
  Synthetic
cccucugcggggaggaccc

SEQ ID NO: 1651 - RNA, 19 nt, Artificial Sequence
  Synthetic
ccucugcggggaggacccg

SEQ ID NO: 1652 - RNA, 19 nt, Artificial Sequence
  Synthetic
cucugcggggaggacccgg

SEQ ID NO: 1653 - RNA, 19 nt, Artificial Sequence
  Synthetic
ucugcggggaggacccggg

SEQ ID NO: 1654 - RNA, 19 nt, Artificial Sequence
  Synthetic
cugcggggaggacccggga

SEQ ID NO: 1655 - RNA, 19 nt, Artificial Sequence
  Synthetic
ugcggggaggacccgggac

SEQ ID NO: 1656 - RNA, 19 nt, Artificial Sequence
  Synthetic
gcggggaggacccgggacc

SEQ ID NO: 1657 - RNA, 19 nt, Artificial Sequence
  Synthetic
cggggaggacccgggacca

SEQ ID NO: 1658 - RNA, 19 nt, Artificial Sequence
  Synthetic
ccccgcuuccucccucugu

SEQ ID NO: 1659 - RNA, 19 nt, Artificial Sequence
  Synthetic
cccgcuuccucccucugug

SEQ ID NO: 1660 - RNA, 19 nt, Artificial Sequence
  Synthetic
ccgcuuccucccucugugg

SEQ ID NO: 1661 - RNA, 19 nt, Artificial Sequence
  Synthetic
cgcuuccucccucuguggg

SEQ ID NO: 1662 - RNA, 19 nt, Artificial Sequence
  Synthetic
gcuuccucccucugugggg

SEQ ID NO: 1663 - RNA, 19 nt, Artificial Sequence
  Synthetic
cuuccucccucugugggga

SEQ ID NO: 1664 - RNA, 19 nt, Artificial Sequence
  Synthetic
uuccucccucuguggggag

SEQ ID NO: 1665 - RNA, 19 nt, Artificial Sequence
  Synthetic
uccucccucuguggggagg

SEQ ID NO: 1666 - RNA, 19 nt, Artificial Sequence
  Synthetic
ccucccucuguggggagga

SEQ ID NO: 1667 - RNA, 19 nt, Artificial Sequence
  Synthetic
cucccucuguggggaggac

SEQ ID NO: 1668 - RNA, 19 nt, Artificial Sequence
  Synthetic
ucccucuguggggaggacc

SEQ ID NO: 1669 - RNA, 19 nt, Artificial Sequence
  Synthetic
cccucuguggggaggaccc

SEQ ID NO: 1670 - RNA, 19 nt, Artificial Sequence
  Synthetic
ccucuguggggaggacccg

SEQ ID NO: 1671 - RNA, 19 nt, Artificial Sequence
  Synthetic
cucuguggggaggacccgg

SEQ ID NO: 1672 - RNA, 19 nt, Artificial Sequence
  Synthetic
ucuguggggaggacccggg

SEQ ID NO: 1673 - RNA, 19 nt, Artificial Sequence
  Synthetic
cuguggggaggacccggga

SEQ ID NO: 1674 - RNA, 19 nt, Artificial Sequence
  Synthetic
uguggggaggacccgggac

SEQ ID NO: 1675 - RNA, 19 nt, Artificial Sequence
  Synthetic
guggggaggacccgggacc

SEQ ID NO: 1676 - RNA, 19 nt, Artificial Sequence
  Synthetic
uggggaggacccgggacca

SEQ ID NO: 1677 - RNA, 19 nt, Artificial Sequence
  Synthetic
cugcuuugcaccgugguca

SEQ ID NO: 1678 - RNA, 19 nt, Artificial Sequence
  Synthetic
ugcuuugcaccguggucag

SEQ ID NO: 1679 - RNA, 19 nt, Artificial Sequence
  Synthetic
gcuuugcaccguggucaga

SEQ ID NO: 1680 - RNA, 19 nt, Artificial Sequence
  Synthetic
cuuugcaccguggucagag

SEQ ID NO: 1681 - RNA, 19 nt, Artificial Sequence
  Synthetic
uuugcaccguggucagagg

SEQ ID NO: 1682 - RNA, 19 nt, Artificial Sequence
  Synthetic
uugcaccguggucagaggg

SEQ ID NO: 1683 - RNA, 19 nt, Artificial Sequence
  Synthetic
ugcaccguggucagaggga

SEQ ID NO: 1684 - RNA, 19 nt, Artificial Sequence
  Synthetic
gcaccguggucagagggac

SEQ ID NO: 1685 - RNA, 19 nt, Artificial Sequence
  Synthetic
caccguggucagagggacu

SEQ ID NO: 1686 - RNA, 19 nt, Artificial Sequence
  Synthetic
accguggucagagggacug

SEQ ID NO: 1687 - RNA, 19 nt, Artificial Sequence
  Synthetic
ccguggucagagggacugu

SEQ ID NO: 1688 - RNA, 19 nt, Artificial Sequence
  Synthetic
cguggucagagggacuguc

SEQ ID NO: 1689 - RNA, 19 nt, Artificial Sequence
  Synthetic
guggucagagggacuguca

SEQ ID NO: 1690 - RNA, 19 nt, Artificial Sequence
  Synthetic
uggucagagggacugucag

SEQ ID NO: 1691 - RNA, 19 nt, Artificial Sequence
  Synthetic
ggucagagggacugucagc

SEQ ID NO: 1692 - RNA, 19 nt, Artificial Sequence
  Synthetic
gucagagggacugucagcu

SEQ ID NO: 1693 - RNA, 19 nt, Artificial Sequence
  Synthetic
ucagagggacugucagcug

SEQ ID NO: 1694 - RNA, 19 nt, Artificial Sequence
  Synthetic
cagagggacugucagcuga

SEQ ID NO: 1695 - RNA, 19 nt, Artificial Sequence
  Synthetic
agagggacugucagcugag

SEQ ID NO: 1696 - RNA, 19 nt, Artificial Sequence
  Synthetic
cugcuuugcaccguggucg

SEQ ID NO: 1697 - RNA, 19 nt, Artificial Sequence
  Synthetic
ugcuuugcaccguggucgg

SEQ ID NO: 1698 - RNA, 19 nt, Artificial Sequence
  Synthetic
gcuuugcaccguggucgga

SEQ ID NO: 1699 - RNA, 19 nt, Artificial Sequence
  Synthetic
cuuugcaccguggucggag

SEQ ID NO: 1700 - RNA, 19 nt, Artificial Sequence
  Synthetic
uuugcaccguggucggagg

SEQ ID NO: 1701 - RNA, 19 nt, Artificial Sequence
  Synthetic
uugcaccguggucggaggg

SEQ ID NO: 1702 - RNA, 19 nt, Artificial Sequence
  Synthetic
ugcaccguggucggaggga

SEQ ID NO: 1703 - RNA, 19 nt, Artificial Sequence
  Synthetic
gcaccguggucggagggac

SEQ ID NO: 1704 - RNA, 19 nt, Artificial Sequence
  Synthetic
caccguggucggagggacu

SEQ ID NO: 1705 - RNA, 19 nt, Artificial Sequence
  Synthetic
accguggucggagggacug

SEQ ID NO: 1706 - RNA, 19 nt, Artificial Sequence
  Synthetic
ccguggucggagggacugu

SEQ ID NO: 1707 - RNA, 19 nt, Artificial Sequence
  Synthetic
cguggucggagggacuguc

SEQ ID NO: 1708 - RNA, 19 nt, Artificial Sequence
  Synthetic
guggucggagggacuguca

SEQ ID NO: 1709 - RNA, 19 nt, Artificial Sequence
  Synthetic
uggucggagggacugucag

SEQ ID NO: 1710 - RNA, 19 nt, Artificial Sequence
  Synthetic
ggucggagggacugucagc

SEQ ID NO: 1711 - RNA, 19 nt, Artificial Sequence
  Synthetic
gucggagggacugucagcu

SEQ ID NO: 1712 - RNA, 19 nt, Artificial Sequence
  Synthetic
ucggagggacugucagcug

SEQ ID NO: 1713 - RNA, 19 nt, Artificial Sequence
  Synthetic
cggagggacugucagcuga

SEQ ID NO: 1714 - RNA, 19 nt, Artificial Sequence
  Synthetic
ggagggacugucagcugag

SEQ ID NO: 1715 - RNA, 19 nt, Artificial Sequence
  Synthetic
ggagccccacccagaccug

SEQ ID NO: 1716 - RNA, 19 nt, Artificial Sequence
  Synthetic
gagccccacccagaccuga

SEQ ID NO: 1717 - RNA, 19 nt, Artificial Sequence
  Synthetic
agccccacccagaccugaa

SEQ ID NO: 1718 - RNA, 19 nt, Artificial Sequence
  Synthetic
gccccacccagaccugaau

SEQ ID NO: 1719 - RNA, 19 nt, Artificial Sequence
  Synthetic
ccccacccagaccugaaug

SEQ ID NO: 1720 - RNA, 19 nt, Artificial Sequence
  Synthetic
cccacccagaccugaaugc

SEQ ID NO: 1721 - RNA, 19 nt, Artificial Sequence
  Synthetic
ccacccagaccugaaugcu

SEQ ID NO: 1722 - RNA, 19 nt, Artificial Sequence
  Synthetic
cacccagaccugaaugcuu

SEQ ID NO: 1723 - RNA, 19 nt, Artificial Sequence
  Synthetic
acccagaccugaaugcuuc

SEQ ID NO: 1724 - RNA, 19 nt, Artificial Sequence
  Synthetic
cccagaccugaaugcuucu

SEQ ID NO: 1725 - RNA, 19 nt, Artificial Sequence
  Synthetic
ccagaccugaaugcuucug

SEQ ID NO: 1726 - RNA, 19 nt, Artificial Sequence
  Synthetic
cagaccugaaugcuucuga

SEQ ID NO: 1727 - RNA, 19 nt, Artificial Sequence
  Synthetic
agaccugaaugcuucugag

SEQ ID NO: 1728 - RNA, 19 nt, Artificial Sequence
  Synthetic
gaccugaaugcuucugaga

SEQ ID NO: 1729 - RNA, 19 nt, Artificial Sequence
  Synthetic
accugaaugcuucugagag

SEQ ID NO: 1730 - RNA, 19 nt, Artificial Sequence
  Synthetic
ccugaaugcuucugagagc

SEQ ID NO: 1731 - RNA, 19 nt, Artificial Sequence
  Synthetic
cugaaugcuucugagagca

SEQ ID NO: 1732 - RNA, 19 nt, Artificial Sequence
  Synthetic
ugaaugcuucugagagcaa

SEQ ID NO: 1733 - RNA, 19 nt, Artificial Sequence
  Synthetic
gaaugcuucugagagcaaa

SEQ ID NO: 1734 - RNA, 19 nt, Artificial Sequence
  Synthetic
ggagccccacccagaccua

SEQ ID NO: 1735 - RNA, 19 nt, Artificial Sequence
  Synthetic
gagccccacccagaccuaa

SEQ ID NO: 1736 - RNA, 19 nt, Artificial Sequence
  Synthetic
agccccacccagaccuaaa

SEQ ID NO: 1737 - RNA, 19 nt, Artificial Sequence
  Synthetic
gccccacccagaccuaaau

SEQ ID NO: 1738 - RNA, 19 nt, Artificial Sequence
  Synthetic
ccccacccagaccuaaaug

SEQ ID NO: 1739 - RNA, 19 nt, Artificial Sequence
  Synthetic
cccacccagaccuaaaugc

SEQ ID NO: 1740 - RNA, 19 nt, Artificial Sequence
  Synthetic
ccacccagaccuaaaugcu

SEQ ID NO: 1741 - RNA, 19 nt, Artificial Sequence
  Synthetic
cacccagaccuaaaugcuu

SEQ ID NO: 1742 - RNA, 19 nt, Artificial Sequence
  Synthetic
acccagaccuaaaugcuuc

SEQ ID NO: 1743 - RNA, 19 nt, Artificial Sequence
  Synthetic
cccagaccuaaaugcuucu

SEQ ID NO: 1744 - RNA, 19 nt, Artificial Sequence
  Synthetic
ccagaccuaaaugcuucug

SEQ ID NO: 1745 - RNA, 19 nt, Artificial Sequence
  Synthetic
cagaccuaaaugcuucuga

SEQ ID NO: 1746 - RNA, 19 nt, Artificial Sequence
  Synthetic
agaccuaaaugcuucugag

SEQ ID NO: 1747 - RNA, 19 nt, Artificial Sequence
  Synthetic
gaccuaaaugcuucugaga

SEQ ID NO: 1748 - RNA, 19 nt, Artificial Sequence
  Synthetic
accuaaaugcuucugagag

SEQ ID NO: 1749 - RNA, 19 nt, Artificial Sequence
  Synthetic
ccuaaaugcuucugagagc

SEQ ID NO: 1750 - RNA, 19 nt, Artificial Sequence
  Synthetic
cuaaaugcuucugagagca

SEQ ID NO: 1751 - RNA, 19 nt, Artificial Sequence
  Synthetic
uaaaugcuucugagagcaa

SEQ ID NO: 1752 - RNA, 19 nt, Artificial Sequence
  Synthetic
aaaugcuucugagagcaaa

SEQ ID NO: 1753 - RNA, 19 nt, Artificial Sequence
  Synthetic
acgccggccagcaugauug

SEQ ID NO: 1754 - RNA, 19 nt, Artificial Sequence
  Synthetic
cacgccggccagcaugauu

SEQ ID NO: 1755 - RNA, 19 nt, Artificial Sequence
  Synthetic
ccacgccggccagcaugau

SEQ ID NO: 1756 - RNA, 19 nt, Artificial Sequence
  Synthetic
gccacgccggccagcauga

SEQ ID NO: 1757 - RNA, 19 nt, Artificial Sequence
  Synthetic
ggccacgccggccagcaug

SEQ ID NO: 1758 - RNA, 19 nt, Artificial Sequence
  Synthetic
gggccacgccggccagcau

SEQ ID NO: 1759 - RNA, 19 nt, Artificial Sequence
  Synthetic
ggggccacgccggccagca

SEQ ID NO: 1760 - RNA, 19 nt, Artificial Sequence
  Synthetic
cggggccacgccggccagc

SEQ ID NO: 1761 - RNA, 19 nt, Artificial Sequence
  Synthetic
gcggggccacgccggccag

SEQ ID NO: 1762 - RNA, 19 nt, Artificial Sequence
  Synthetic
ggcggggccacgccggcca

SEQ ID NO: 1763 - RNA, 19 nt, Artificial Sequence
  Synthetic
aggcggggccacgccggcc

SEQ ID NO: 1764 - RNA, 19 nt, Artificial Sequence
  Synthetic
gaggcggggccacgccggc

SEQ ID NO: 1765 - RNA, 19 nt, Artificial Sequence
  Synthetic
ggaggcggggccacgccgg

SEQ ID NO: 1766 - RNA, 19 nt, Artificial Sequence
  Synthetic
cggaggcggggccacgccg

SEQ ID NO: 1767 - RNA, 19 nt, Artificial Sequence
  Synthetic
gcggaggcggggccacgcc

SEQ ID NO: 1768 - RNA, 19 nt, Artificial Sequence
  Synthetic
ggcggaggcggggccacgc

SEQ ID NO: 1769 - RNA, 19 nt, Artificial Sequence
  Synthetic
cggcggaggcggggccacg

SEQ ID NO: 1770 - RNA, 19 nt, Artificial Sequence
  Synthetic
ccggcggaggcggggccac

SEQ ID NO: 1771 - RNA, 19 nt, Artificial Sequence
  Synthetic
gccggcggaggcggggcca

SEQ ID NO: 1772 - RNA, 19 nt, Artificial Sequence
  Synthetic
gcgccggccagcaugauug

SEQ ID NO: 1773 - RNA, 19 nt, Artificial Sequence
  Synthetic
cgcgccggccagcaugauu

SEQ ID NO: 1774 - RNA, 19 nt, Artificial Sequence
  Synthetic
ccgcgccggccagcaugau

SEQ ID NO: 1775 - RNA, 19 nt, Artificial Sequence
  Synthetic
gccgcgccggccagcauga

SEQ ID NO: 1776 - RNA, 19 nt, Artificial Sequence
  Synthetic
ggccgcgccggccagcaug

SEQ ID NO: 1777 - RNA, 19 nt, Artificial Sequence
  Synthetic
gggccgcgccggccagcau

SEQ ID NO: 1778 - RNA, 19 nt, Artificial Sequence
  Synthetic
ggggccgcgccggccagca

SEQ ID NO: 1779 - RNA, 19 nt, Artificial Sequence
  Synthetic
cggggccgcgccggccagc

SEQ ID NO: 1780 - RNA, 19 nt, Artificial Sequence
  Synthetic
gcggggccgcgccggccag

SEQ ID NO: 1781 - RNA, 19 nt, Artificial Sequence
  Synthetic
ggcggggccgcgccggcca

SEQ ID NO: 1782 - RNA, 19 nt, Artificial Sequence
  Synthetic
aggcggggccgcgccggcc

SEQ ID NO: 1783 - RNA, 19 nt, Artificial Sequence
  Synthetic
gaggcggggccgcgccggc

SEQ ID NO: 1784 - RNA, 19 nt, Artificial Sequence
  Synthetic
ggaggcggggccgcgccgg

SEQ ID NO: 1785 - RNA, 19 nt, Artificial Sequence
  Synthetic
cggaggcggggccgcgccg

SEQ ID NO: 1786 - RNA, 19 nt, Artificial Sequence
  Synthetic
gcggaggcggggccgcgcc

SEQ ID NO: 1787 - RNA, 19 nt, Artificial Sequence
  Synthetic
ggcggaggcggggccgcgc

SEQ ID NO: 1788 - RNA, 19 nt, Artificial Sequence
  Synthetic
cggcggaggcggggccgcg

SEQ ID NO: 1789 - RNA, 19 nt, Artificial Sequence
  Synthetic
ccggcggaggcggggccgc

SEQ ID NO: 1790 - RNA, 19 nt, Artificial Sequence
  Synthetic
gccggcggaggcggggccg

SEQ ID NO: 1791 - RNA, 19 nt, Artificial Sequence
  Synthetic
aggccuucaucagcuuuuc

SEQ ID NO: 1792 - RNA, 19 nt, Artificial Sequence
  Synthetic
aaggccuucaucagcuuuu

SEQ ID NO: 1793 - RNA, 19 nt, Artificial Sequence
  Synthetic
gaaggccuucaucagcuuu

SEQ ID NO: 1794 - RNA, 19 nt, Artificial Sequence
  Synthetic
cgaaggccuucaucagcuu

SEQ ID NO: 1795 - RNA, 19 nt, Artificial Sequence
  Synthetic
ucgaaggccuucaucagcu

SEQ ID NO: 1796 - RNA, 19 nt, Artificial Sequence
  Synthetic
cucgaaggccuucaucagc

SEQ ID NO: 1797 - RNA, 19 nt, Artificial Sequence
  Synthetic
acucgaaggccuucaucag

SEQ ID NO: 1798 - RNA, 19 nt, Artificial Sequence
  Synthetic
gacucgaaggccuucauca

SEQ ID NO: 1799 - RNA, 19 nt, Artificial Sequence
  Synthetic
ggacucgaaggccuucauc

SEQ ID NO: 1800 - RNA, 19 nt, Artificial Sequence
  Synthetic
gggacucgaaggccuucau

SEQ ID NO: 1801 - RNA, 19 nt, Artificial Sequence
  Synthetic
agggacucgaaggccuuca

SEQ ID NO: 1802 - RNA, 19 nt, Artificial Sequence
  Synthetic
gagggacucgaaggccuuc

SEQ ID NO: 1803 - RNA, 19 nt, Artificial Sequence
  Synthetic
ugagggacucgaaggccuu

SEQ ID NO: 1804 - RNA, 19 nt, Artificial Sequence
  Synthetic
uugagggacucgaaggccu

SEQ ID NO: 1805 - RNA, 19 nt, Artificial Sequence
  Synthetic
cuugagggacucgaaggcc

SEQ ID NO: 1806 - RNA, 19 nt, Artificial Sequence
  Synthetic
acuugagggacucgaaggc

SEQ ID NO: 1807 - RNA, 18 nt, Artificial Sequence
  Synthetic
acuugagggacucgaagg

SEQ ID NO: 1808 - RNA, 19 nt, Artificial Sequence
  Synthetic
cggccuucaucagcuuuuc

SEQ ID NO: 1809 - RNA, 19 nt, Artificial Sequence
  Synthetic
gcggccuucaucagcuuuu

SEQ ID NO: 1810 - RNA, 19 nt, Artificial Sequence
  Synthetic
ggcggccuucaucagcuuu

SEQ ID NO: 1811 - RNA, 19 nt, Artificial Sequence
  Synthetic
aggcggccuucaucagcuu

SEQ ID NO: 1812 - RNA, 19 nt, Artificial Sequence
  Synthetic
aaggcggccuucaucagcu

SEQ ID NO: 1813 - RNA, 19 nt, Artificial Sequence
  Synthetic
gaaggcggccuucaucagc

SEQ ID NO: 1814 - RNA, 19 nt, Artificial Sequence
  Synthetic
cgaaggcggccuucaucag

SEQ ID NO: 1815 - RNA, 19 nt, Artificial Sequence
  Synthetic
ucgaaggcggccuucauca

SEQ ID NO: 1816 - RNA, 19 nt, Artificial Sequence
  Synthetic
cucgaaggcggccuucauc

SEQ ID NO: 1817 - RNA, 19 nt, Artificial Sequence
  Synthetic
acucgaaggcggccuucau

SEQ ID NO: 1818 - RNA, 19 nt, Artificial Sequence
  Synthetic
gacucgaaggcggccuuca

SEQ ID NO: 1819 - RNA, 19 nt, Artificial Sequence
  Synthetic
ggacucgaaggcggccuuc

SEQ ID NO: 1820 - RNA, 19 nt, Artificial Sequence
  Synthetic
gggacucgaaggcggccuu

SEQ ID NO: 1821 - RNA, 19 nt, Artificial Sequence
  Synthetic
agggacucgaaggcggccu

SEQ ID NO: 1822 - RNA, 19 nt, Artificial Sequence
  Synthetic
gagggacucgaaggcggcc

SEQ ID NO: 1823 - RNA, 19 nt, Artificial Sequence
  Synthetic
ugagggacucgaaggcggc

SEQ ID NO: 1824 - RNA, 19 nt, Artificial Sequence
  Synthetic
uugagggacucgaaggcgg

SEQ ID NO: 1825 - RNA, 19 nt, Artificial Sequence
  Synthetic
cuugagggacucgaaggcg

SEQ ID NO: 1826 - RNA, 19 nt, Artificial Sequence
  Synthetic
augaaggccuuuaacaaaa

SEQ ID NO: 1827 - RNA, 19 nt, Artificial Sequence
  Synthetic
uaugaaggccuuuaacaaa

SEQ ID NO: 1828 - RNA, 19 nt, Artificial Sequence
  Synthetic
cuaugaaggccuuuaacaa

SEQ ID NO: 1829 - RNA, 19 nt, Artificial Sequence
  Synthetic
gcuaugaaggccuuuaaca

SEQ ID NO: 1830 - RNA, 19 nt, Artificial Sequence
  Synthetic
cgcuaugaaggccuuuaac

SEQ ID NO: 1831 - RNA, 19 nt, Artificial Sequence
  Synthetic
ucgcuaugaaggccuuuaa

SEQ ID NO: 1832 - RNA, 19 nt, Artificial Sequence
  Synthetic
uucgcuaugaaggccuuua

SEQ ID NO: 1833 - RNA, 19 nt, Artificial Sequence
  Synthetic
guucgcuaugaaggccuuu

SEQ ID NO: 1834 - RNA, 19 nt, Artificial Sequence
  Synthetic
gguucgcuaugaaggccuu

SEQ ID NO: 1835 - RNA, 19 nt, Artificial Sequence
  Synthetic
agguucgcuaugaaggccu

SEQ ID NO: 1836 - RNA, 19 nt, Artificial Sequence
  Synthetic
cagguucgcuaugaaggcc

SEQ ID NO: 1837 - RNA, 19 nt, Artificial Sequence
  Synthetic
ucagguucgcuaugaaggc

SEQ ID NO: 1838 - RNA, 19 nt, Artificial Sequence
  Synthetic
uucagguucgcuaugaagg

SEQ ID NO: 1839 - RNA, 19 nt, Artificial Sequence
  Synthetic
cuucagguucgcuaugaag

SEQ ID NO: 1840 - RNA, 19 nt, Artificial Sequence
  Synthetic
acuucagguucgcuaugaa

SEQ ID NO: 1841 - RNA, 19 nt, Artificial Sequence
  Synthetic
gacuucagguucgcuauga

SEQ ID NO: 1842 - RNA, 19 nt, Artificial Sequence
  Synthetic
ugacuucagguucgcuaug

SEQ ID NO: 1843 - RNA, 19 nt, Artificial Sequence
  Synthetic
uugacuucagguucgcuau

SEQ ID NO: 1844 - RNA, 19 nt, Artificial Sequence
  Synthetic
cuugacuucagguucgcua

SEQ ID NO: 1845 - RNA, 19 nt, Artificial Sequence
  Synthetic
gugaaggccuuuaacaaaa

SEQ ID NO: 1846 - RNA, 19 nt, Artificial Sequence
  Synthetic
ugugaaggccuuuaacaaa

SEQ ID NO: 1847 - RNA, 19 nt, Artificial Sequence
  Synthetic
cugugaaggccuuuaacaa

SEQ ID NO: 1848 - RNA, 19 nt, Artificial Sequence
  Synthetic
gcugugaaggccuuuaaca

SEQ ID NO: 1849 - RNA, 19 nt, Artificial Sequence
  Synthetic
cgcugugaaggccuuuaac

SEQ ID NO: 1850 - RNA, 19 nt, Artificial Sequence
  Synthetic
ucgcugugaaggccuuuaa

SEQ ID NO: 1851 - RNA, 19 nt, Artificial Sequence
  Synthetic
uucgcugugaaggccuuua

SEQ ID NO: 1852 - RNA, 19 nt, Artificial Sequence
  Synthetic
guucgcugugaaggccuuu

SEQ ID NO: 1853 - RNA, 19 nt, Artificial Sequence
  Synthetic
gguucgcugugaaggccuu

SEQ ID NO: 1854 - RNA, 19 nt, Artificial Sequence
  Synthetic
agguucgcugugaaggccu

SEQ ID NO: 1855 - RNA, 19 nt, Artificial Sequence
  Synthetic
cagguucgcugugaaggcc

SEQ ID NO: 1856 - RNA, 19 nt, Artificial Sequence
  Synthetic
ucagguucgcugugaaggc

SEQ ID NO: 1857 - RNA, 19 nt, Artificial Sequence
  Synthetic
uucagguucgcugugaagg

SEQ ID NO: 1858 - RNA, 19 nt, Artificial Sequence
  Synthetic
cuucagguucgcugugaag

SEQ ID NO: 1859 - RNA, 19 nt, Artificial Sequence
  Synthetic
acuucagguucgcugugaa

SEQ ID NO: 1860 - RNA, 19 nt, Artificial Sequence
  Synthetic
gacuucagguucgcuguga

SEQ ID NO: 1861 - RNA, 19 nt, Artificial Sequence
  Synthetic
ugacuucagguucgcugug

SEQ ID NO: 1862 - RNA, 19 nt, Artificial Sequence
  Synthetic
uugacuucagguucgcugu

SEQ ID NO: 1863 - RNA, 19 nt, Artificial Sequence
  Synthetic
cuugacuucagguucgcug

SEQ ID NO: 1864 - RNA, 19 nt, Artificial Sequence
  Synthetic
gagcacauuuaguagccaa

SEQ ID NO: 1865 - RNA, 19 nt, Artificial Sequence
  Synthetic
agagcacauuuaguagcca

SEQ ID NO: 1866 - RNA, 19 nt, Artificial Sequence
  Synthetic
aagagcacauuuaguagcc

SEQ ID NO: 1867 - RNA, 19 nt, Artificial Sequence
  Synthetic
uaagagcacauuuaguagc

SEQ ID NO: 1868 - RNA, 19 nt, Artificial Sequence
  Synthetic
cuaagagcacauuuaguag

SEQ ID NO: 1869 - RNA, 19 nt, Artificial Sequence
  Synthetic
ccuaagagcacauuuagua

SEQ ID NO: 1870 - RNA, 19 nt, Artificial Sequence
  Synthetic
gccuaagagcacauuuagu

SEQ ID NO: 1871 - RNA, 19 nt, Artificial Sequence
  Synthetic
agccuaagagcacauuuag

SEQ ID NO: 1872 - RNA, 19 nt, Artificial Sequence
  Synthetic
aagccuaagagcacauuua

SEQ ID NO: 1873 - RNA, 19 nt, Artificial Sequence
  Synthetic
uaagccuaagagcacauuu

SEQ ID NO: 1874 - RNA, 19 nt, Artificial Sequence
  Synthetic
guaagccuaagagcacauu

SEQ ID NO: 1875 - RNA, 19 nt, Artificial Sequence
  Synthetic
aguaagccuaagagcacau

SEQ ID NO: 1876 - RNA, 19 nt, Artificial Sequence
  Synthetic
gaguaagccuaagagcaca

SEQ ID NO: 1877 - RNA, 19 nt, Artificial Sequence
  Synthetic
cgaguaagccuaagagcac

SEQ ID NO: 1878 - RNA, 19 nt, Artificial Sequence
  Synthetic
acgaguaagccuaagagca

SEQ ID NO: 1879 - RNA, 19 nt, Artificial Sequence
  Synthetic
aacgaguaagccuaagagc

SEQ ID NO: 1880 - RNA, 19 nt, Artificial Sequence
  Synthetic
gaacgaguaagccuaagag

SEQ ID NO: 1881 - RNA, 19 nt, Artificial Sequence
  Synthetic
ggaacgaguaagccuaaga

SEQ ID NO: 1882 - RNA, 19 nt, Artificial Sequence
  Synthetic
aggaacgaguaagccuaag

SEQ ID NO: 1883 - RNA, 19 nt, Artificial Sequence
  Synthetic
cagcacauuuaguagccaa

SEQ ID NO: 1884 - RNA, 19 nt, Artificial Sequence
  Synthetic
acagcacauuuaguagcca

SEQ ID NO: 1885 - RNA, 19 nt, Artificial Sequence
  Synthetic
aacagcacauuuaguagcc

SEQ ID NO: 1886 - RNA, 19 nt, Artificial Sequence
  Synthetic
uaacagcacauuuaguagc

SEQ ID NO: 1887 - RNA, 19 nt, Artificial Sequence
  Synthetic
cuaacagcacauuuaguag

SEQ ID NO: 1888 - RNA, 19 nt, Artificial Sequence
  Synthetic
ccuaacagcacauuuagua

SEQ ID NO: 1889 - RNA, 19 nt, Artificial Sequence
  Synthetic
gccuaacagcacauuuagu

SEQ ID NO: 1890 - RNA, 19 nt, Artificial Sequence
  Synthetic
agccuaacagcacauuuag

SEQ ID NO: 1891 - RNA, 19 nt, Artificial Sequence
  Synthetic
aagccuaacagcacauuua

SEQ ID NO: 1892 - RNA, 19 nt, Artificial Sequence
  Synthetic
uaagccuaacagcacauuu

SEQ ID NO: 1893 - RNA, 19 nt, Artificial Sequence
  Synthetic
guaagccuaacagcacauu

SEQ ID NO: 1894 - RNA, 19 nt, Artificial Sequence
  Synthetic
aguaagccuaacagcacau

SEQ ID NO: 1895 - RNA, 19 nt, Artificial Sequence
  Synthetic
gaguaagccuaacagcaca

SEQ ID NO: 1896 - RNA, 19 nt, Artificial Sequence
  Synthetic
cgaguaagccuaacagcac

SEQ ID NO: 1897 - RNA, 19 nt, Artificial Sequence
  Synthetic
acgaguaagccuaacagca

SEQ ID NO: 1898 - RNA, 19 nt, Artificial Sequence
  Synthetic
aacgaguaagccuaacagc

SEQ ID NO: 1899 - RNA, 19 nt, Artificial Sequence
  Synthetic
gaacgaguaagccuaacag

SEQ ID NO: 1900 - RNA, 19 nt, Artificial Sequence
  Synthetic
ggaacgaguaagccuaaca

SEQ ID NO: 1901 - RNA, 19 nt, Artificial Sequence
  Synthetic
aggaacgaguaagccuaac

SEQ ID NO: 1902 - RNA, 19 nt, Artificial Sequence
  Synthetic
ggucaggguuugcagaagc

SEQ ID NO: 1903 - RNA, 19 nt, Artificial Sequence
  Synthetic
cggucaggguuugcagaag

SEQ ID NO: 1904 - RNA, 19 nt, Artificial Sequence
  Synthetic
gcggucaggguuugcagaa

SEQ ID NO: 1905 - RNA, 19 nt, Artificial Sequence
  Synthetic
ugcggucaggguuugcaga

SEQ ID NO: 1906 - RNA, 19 nt, Artificial Sequence
  Synthetic
cugcggucaggguuugcag

SEQ ID NO: 1907 - RNA, 19 nt, Artificial Sequence
  Synthetic
acugcggucaggguuugca

SEQ ID NO: 1908 - RNA, 19 nt, Artificial Sequence
  Synthetic
gacugcggucaggguuugc

SEQ ID NO: 1909 - RNA, 19 nt, Artificial Sequence
  Synthetic
cgacugcggucaggguuug

SEQ ID NO: 1910 - RNA, 19 nt, Artificial Sequence
  Synthetic
ccgacugcggucaggguuu

SEQ ID NO: 1911 - RNA, 19 nt, Artificial Sequence
  Synthetic
cccgacugcggucaggguu

SEQ ID NO: 1912 - RNA, 19 nt, Artificial Sequence
  Synthetic
ccccgacugcggucagggu

SEQ ID NO: 1913 - RNA, 19 nt, Artificial Sequence
  Synthetic
cccccgacugcggucaggg

SEQ ID NO: 1914 - RNA, 19 nt, Artificial Sequence
  Synthetic
gcccccgacugcggucagg

SEQ ID NO: 1915 - RNA, 19 nt, Artificial Sequence
  Synthetic
ugcccccgacugcggucag

SEQ ID NO: 1916 - RNA, 19 nt, Artificial Sequence
  Synthetic
augcccccgacugcgguca

SEQ ID NO: 1917 - RNA, 19 nt, Artificial Sequence
  Synthetic
aaugcccccgacugcgguc

SEQ ID NO: 1918 - RNA, 19 nt, Artificial Sequence
  Synthetic
caaugcccccgacugcggu

SEQ ID NO: 1919 - RNA, 19 nt, Artificial Sequence
  Synthetic
ccaaugcccccgacugcgg

SEQ ID NO: 1920 - RNA, 19 nt, Artificial Sequence
  Synthetic
cccaaugcccccgacugcg

SEQ ID NO: 1921 - RNA, 19 nt, Artificial Sequence
  Synthetic
agucaggguuugcagaagc

SEQ ID NO: 1922 - RNA, 19 nt, Artificial Sequence
  Synthetic
cagucaggguuugcagaag

SEQ ID NO: 1923 - RNA, 19 nt, Artificial Sequence
  Synthetic
gcagucaggguuugcagaa

SEQ ID NO: 1924 - RNA, 19 nt, Artificial Sequence
  Synthetic
ugcagucaggguuugcaga

SEQ ID NO: 1925 - RNA, 19 nt, Artificial Sequence
  Synthetic
cugcagucaggguuugcag

SEQ ID NO: 1926 - RNA, 19 nt, Artificial Sequence
  Synthetic
acugcagucaggguuugca

SEQ ID NO: 1927 - RNA, 19 nt, Artificial Sequence
  Synthetic
gacugcagucaggguuugc

SEQ ID NO: 1928 - RNA, 19 nt, Artificial Sequence
  Synthetic
cgacugcagucaggguuug

SEQ ID NO: 1929 - RNA, 19 nt, Artificial Sequence
  Synthetic
ccgacugcagucaggguuu

SEQ ID NO: 1930 - RNA, 19 nt, Artificial Sequence
  Synthetic
cccgacugcagucaggguu

SEQ ID NO: 1931 - RNA, 19 nt, Artificial Sequence
  Synthetic
ccccgacugcagucagggu

SEQ ID NO: 1932 - RNA, 19 nt, Artificial Sequence
  Synthetic
cccccgacugcagucaggg

SEQ ID NO: 1933 - RNA, 19 nt, Artificial Sequence
  Synthetic
gcccccgacugcagucagg

SEQ ID NO: 1934 - RNA, 19 nt, Artificial Sequence
  Synthetic
ugcccccgacugcagucag

SEQ ID NO: 1935 - RNA, 19 nt, Artificial Sequence
  Synthetic
augcccccgacugcaguca

SEQ ID NO: 1936 - RNA, 19 nt, Artificial Sequence
  Synthetic
aaugcccccgacugcaguc

SEQ ID NO: 1937 - RNA, 19 nt, Artificial Sequence
  Synthetic
caaugcccccgacugcagu

SEQ ID NO: 1938 - RNA, 19 nt, Artificial Sequence
  Synthetic
ccaaugcccccgacugcag

SEQ ID NO: 1939 - RNA, 19 nt, Artificial Sequence
  Synthetic
cccaaugcccccgacugca

SEQ ID NO: 1940 - RNA, 19 nt, Artificial Sequence
  Synthetic
cagauccacugaguccgcc

SEQ ID NO: 1941 - RNA, 19 nt, Artificial Sequence
  Synthetic
ccagauccacugaguccgc

SEQ ID NO: 1942 - RNA, 19 nt, Artificial Sequence
  Synthetic
gccagauccacugaguccg

SEQ ID NO: 1943 - RNA, 19 nt, Artificial Sequence
  Synthetic
ggccagauccacugagucc

SEQ ID NO: 1944 - RNA, 19 nt, Artificial Sequence
  Synthetic
uggccagauccacugaguc

SEQ ID NO: 1945 - RNA, 19 nt, Artificial Sequence
  Synthetic
cuggccagauccacugagu

SEQ ID NO: 1946 - RNA, 19 nt, Artificial Sequence
  Synthetic
gcuggccagauccacugag

SEQ ID NO: 1947 - RNA, 19 nt, Artificial Sequence
  Synthetic
agcuggccagauccacuga

SEQ ID NO: 1948 - RNA, 19 nt, Artificial Sequence
  Synthetic
cagcuggccagauccacug

SEQ ID NO: 1949 - RNA, 19 nt, Artificial Sequence
  Synthetic
acagcuggccagauccacu

SEQ ID NO: 1950 - RNA, 19 nt, Artificial Sequence
  Synthetic
cacagcuggccagauccac

SEQ ID NO: 1951 - RNA, 19 nt, Artificial Sequence
  Synthetic
ucacagcuggccagaucca

SEQ ID NO: 1952 - RNA, 19 nt, Artificial Sequence
  Synthetic
gucacagcuggccagaucc

SEQ ID NO: 1953 - RNA, 19 nt, Artificial Sequence
  Synthetic
agucacagcuggccagauc

SEQ ID NO: 1954 - RNA, 19 nt, Artificial Sequence
  Synthetic
aagucacagcuggccagau

SEQ ID NO: 1955 - RNA, 19 nt, Artificial Sequence
  Synthetic
caagucacagcuggccaga

SEQ ID NO: 1956 - RNA, 19 nt, Artificial Sequence
  Synthetic
ucaagucacagcuggccag

SEQ ID NO: 1957 - RNA, 19 nt, Artificial Sequence
  Synthetic
gucaagucacagcuggcca

SEQ ID NO: 1958 - RNA, 19 nt, Artificial Sequence
  Synthetic
ugucaagucacagcuggcc

SEQ ID NO: 1959 - RNA, 19 nt, Artificial Sequence
  Synthetic
uagauccacugaguccgcc

SEQ ID NO: 1960 - RNA, 19 nt, Artificial Sequence
  Synthetic
cuagauccacugaguccgc

SEQ ID NO: 1961 - RNA, 19 nt, Artificial Sequence
  Synthetic
gcuagauccacugaguccg

SEQ ID NO: 1962 - RNA, 19 nt, Artificial Sequence
  Synthetic
ggcuagauccacugagucc

SEQ ID NO: 1963 - RNA, 19 nt, Artificial Sequence
  Synthetic
uggcuagauccacugaguc

SEQ ID NO: 1964 - RNA, 19 nt, Artificial Sequence
  Synthetic
cuggcuagauccacugagu

SEQ ID NO: 1965 - RNA, 19 nt, Artificial Sequence
  Synthetic
gcuggcuagauccacugag

SEQ ID NO: 1966 - RNA, 19 nt, Artificial Sequence
  Synthetic
agcuggcuagauccacuga

SEQ ID NO: 1967 - RNA, 19 nt, Artificial Sequence
  Synthetic
cagcuggcuagauccacug

SEQ ID NO: 1968 - RNA, 19 nt, Artificial Sequence
  Synthetic
acagcuggcuagauccacu

SEQ ID NO: 1969 - RNA, 19 nt, Artificial Sequence
  Synthetic
cacagcuggcuagauccac

SEQ ID NO: 1970 - RNA, 19 nt, Artificial Sequence
  Synthetic
ucacagcuggcuagaucca

SEQ ID NO: 1971 - RNA, 19 nt, Artificial Sequence
  Synthetic
gucacagcuggcuagaucc

SEQ ID NO: 1972 - RNA, 19 nt, Artificial Sequence
  Synthetic
agucacagcuggcuagauc

SEQ ID NO: 1973 - RNA, 19 nt, Artificial Sequence
  Synthetic
aagucacagcuggcuagau

SEQ ID NO: 1974 - RNA, 19 nt, Artificial Sequence
  Synthetic
caagucacagcuggcuaga

SEQ ID NO: 1975 - RNA, 19 nt, Artificial Sequence
  Synthetic
ucaagucacagcuggcuag

SEQ ID NO: 1976 - RNA, 19 nt, Artificial Sequence
  Synthetic
gucaagucacagcuggcua

SEQ ID NO: 1977 - RNA, 19 nt, Artificial Sequence
  Synthetic
ugucaagucacagcuggcu

SEQ ID NO: 1978 - RNA, 19 nt, Artificial Sequence
  Synthetic
cucuguguaaguuuucugc

SEQ ID NO: 1979 - RNA, 19 nt, Artificial Sequence
  Synthetic
ccucuguguaaguuuucug

SEQ ID NO: 1980 - RNA, 19 nt, Artificial Sequence
  Synthetic
cccucuguguaaguuuucu

SEQ ID NO: 1981 - RNA, 19 nt, Artificial Sequence
  Synthetic
ccccucuguguaaguuuuc

SEQ ID NO: 1982 - RNA, 19 nt, Artificial Sequence
  Synthetic
gccccucuguguaaguuuu

SEQ ID NO: 1983 - RNA, 19 nt, Artificial Sequence
  Synthetic
agccccucuguguaaguuu

SEQ ID NO: 1984 - RNA, 19 nt, Artificial Sequence
  Synthetic
gagccccucuguguaaguu

SEQ ID NO: 1985 - RNA, 19 nt, Artificial Sequence
  Synthetic
ugagccccucuguguaagu

SEQ ID NO: 1986 - RNA, 19 nt, Artificial Sequence
  Synthetic
augagccccucuguguaag

SEQ ID NO: 1987 - RNA, 19 nt, Artificial Sequence
  Synthetic
gaugagccccucuguguaa

SEQ ID NO: 1988 - RNA, 19 nt, Artificial Sequence
  Synthetic
ugaugagccccucugugua

SEQ ID NO: 1989 - RNA, 19 nt, Artificial Sequence
  Synthetic
augaugagccccucugugu

SEQ ID NO: 1990 - RNA, 19 nt, Artificial Sequence
  Synthetic
aaugaugagccccucugug

SEQ ID NO: 1991 - RNA, 19 nt, Artificial Sequence
  Synthetic
uaaugaugagccccucugu

SEQ ID NO: 1992 - RNA, 19 nt, Artificial Sequence
  Synthetic
auaaugaugagccccucug

SEQ ID NO: 1993 - RNA, 19 nt, Artificial Sequence
  Synthetic
uauaaugaugagccccucu

SEQ ID NO: 1994 - RNA, 19 nt, Artificial Sequence
  Synthetic
guauaaugaugagccccuc

SEQ ID NO: 1995 - RNA, 19 nt, Artificial Sequence
  Synthetic
uguauaaugaugagccccu

SEQ ID NO: 1996 - RNA, 19 nt, Artificial Sequence
  Synthetic
cuguauaaugaugagcccc

SEQ ID NO: 1997 - RNA, 19 nt, Artificial Sequence
  Synthetic
uucuguguaaguuuucugc

SEQ ID NO: 1998 - RNA, 19 nt, Artificial Sequence
  Synthetic
cuucuguguaaguuuucug

SEQ ID NO: 1999 - RNA, 19 nt, Artificial Sequence
  Synthetic
ccuucuguguaaguuuucu

SEQ ID NO: 2000 - RNA, 19 nt, Artificial Sequence
  Synthetic
cccuucuguguaaguuuuc

SEQ ID NO: 2001 - RNA, 19 nt, Artificial Sequence
  Synthetic
gcccuucuguguaaguuuu

SEQ ID NO: 2002 - RNA, 19 nt, Artificial Sequence
  Synthetic
agcccuucuguguaaguuu

SEQ ID NO: 2003 - RNA, 19 nt, Artificial Sequence
  Synthetic
gagcccuucuguguaaguu

SEQ ID NO: 2004 - RNA, 19 nt, Artificial Sequence
  Synthetic
ugagcccuucuguguaagu

SEQ ID NO: 2005 - RNA, 19 nt, Artificial Sequence
  Synthetic
augagcccuucuguguaag

SEQ ID NO: 2006 - RNA, 19 nt, Artificial Sequence
  Synthetic
gaugagcccuucuguguaa

SEQ ID NO: 2007 - RNA, 19 nt, Artificial Sequence
  Synthetic
ugaugagcccuucugugua

SEQ ID NO: 2008 - RNA, 19 nt, Artificial Sequence
  Synthetic
augaugagcccuucugugu

SEQ ID NO: 2009 - RNA, 19 nt, Artificial Sequence
  Synthetic
aaugaugagcccuucugug

SEQ ID NO: 2010 - RNA, 19 nt, Artificial Sequence
  Synthetic
uaaugaugagcccuucugu

SEQ ID NO: 2011 - RNA, 19 nt, Artificial Sequence
  Synthetic
auaaugaugagcccuucug

SEQ ID NO: 2012 - RNA, 19 nt, Artificial Sequence
  Synthetic
uauaaugaugagcccuucu

SEQ ID NO: 2013 - RNA, 19 nt, Artificial Sequence
  Synthetic
guauaaugaugagcccuuc

SEQ ID NO: 2014 - RNA, 19 nt, Artificial Sequence
  Synthetic
uguauaaugaugagcccuu

SEQ ID NO: 2015 - RNA, 19 nt, Artificial Sequence
  Synthetic
cuguauaaugaugagcccu

SEQ ID NO: 2016 - RNA, 19 nt, Artificial Sequence
  Synthetic
ccaaugggaaccaagcuga

SEQ ID NO: 2017 - RNA, 19 nt, Artificial Sequence
  Synthetic
uccaaugggaaccaagcug

SEQ ID NO: 2018 - RNA, 19 nt, Artificial Sequence
  Synthetic
auccaaugggaaccaagcu

SEQ ID NO: 2019 - RNA, 19 nt, Artificial Sequence
  Synthetic
gauccaaugggaaccaagc

SEQ ID NO: 2020 - RNA, 19 nt, Artificial Sequence
  Synthetic
agauccaaugggaaccaag

SEQ ID NO: 2021 - RNA, 19 nt, Artificial Sequence
  Synthetic
gagauccaaugggaaccaa

SEQ ID NO: 2022 - RNA, 19 nt, Artificial Sequence
  Synthetic
agagauccaaugggaacca

SEQ ID NO: 2023 - RNA, 19 nt, Artificial Sequence
  Synthetic
gagagauccaaugggaacc

SEQ ID NO: 2024 - RNA, 19 nt, Artificial Sequence
  Synthetic
ugagagauccaaugggaac

SEQ ID NO: 2025 - RNA, 19 nt, Artificial Sequence
  Synthetic
cugagagauccaaugggaa

SEQ ID NO: 2026 - RNA, 19 nt, Artificial Sequence
  Synthetic
gcugagagauccaauggga

SEQ ID NO: 2027 - RNA, 19 nt, Artificial Sequence
  Synthetic
ggcugagagauccaauggg

SEQ ID NO: 2028 - RNA, 19 nt, Artificial Sequence
  Synthetic
gggcugagagauccaaugg

SEQ ID NO: 2029 - RNA, 19 nt, Artificial Sequence
  Synthetic
ugggcugagagauccaaug

SEQ ID NO: 2030 - RNA, 19 nt, Artificial Sequence
  Synthetic
augggcugagagauccaau

SEQ ID NO: 2031 - RNA, 19 nt, Artificial Sequence
  Synthetic
gaugggcugagagauccaa

SEQ ID NO: 2032 - RNA, 19 nt, Artificial Sequence
  Synthetic
ugaugggcugagagaucca

SEQ ID NO: 2033 - RNA, 19 nt, Artificial Sequence
  Synthetic
uugaugggcugagagaucc

SEQ ID NO: 2034 - RNA, 19 nt, Artificial Sequence
  Synthetic
cuugaugggcugagagauc

SEQ ID NO: 2035 - RNA, 19 nt, Artificial Sequence
  Synthetic
ucaaugggaaccaagcuga

SEQ ID NO: 2036 - RNA, 19 nt, Artificial Sequence
  Synthetic
uucaaugggaaccaagcug

SEQ ID NO: 2037 - RNA, 19 nt, Artificial Sequence
  Synthetic
auucaaugggaaccaagcu

SEQ ID NO: 2038 - RNA, 19 nt, Artificial Sequence
  Synthetic
gauucaaugggaaccaagc

SEQ ID NO: 2039 - RNA, 19 nt, Artificial Sequence
  Synthetic
agauucaaugggaaccaag

SEQ ID NO: 2040 - RNA, 19 nt, Artificial Sequence
  Synthetic
gagauucaaugggaaccaa

SEQ ID NO: 2041 - RNA, 19 nt, Artificial Sequence
  Synthetic
agagauucaaugggaacca

SEQ ID NO: 2042 - RNA, 19 nt, Artificial Sequence
  Synthetic
gagagauucaaugggaacc

SEQ ID NO: 2043 - RNA, 19 nt, Artificial Sequence
  Synthetic
ugagagauucaaugggaac

SEQ ID NO: 2044 - RNA, 19 nt, Artificial Sequence
  Synthetic
cugagagauucaaugggaa

SEQ ID NO: 2045 - RNA, 19 nt, Artificial Sequence
  Synthetic
gcugagagauucaauggga

SEQ ID NO: 2046 - RNA, 19 nt, Artificial Sequence
  Synthetic
ggcugagagauucaauggg

SEQ ID NO: 2047 - RNA, 19 nt, Artificial Sequence
  Synthetic
gggcugagagauucaaugg

SEQ ID NO: 2048 - RNA, 19 nt, Artificial Sequence
  Synthetic
ugggcugagagauucaaug

SEQ ID NO: 2049 - RNA, 19 nt, Artificial Sequence
  Synthetic
augggcugagagauucaau

SEQ ID NO: 2050 - RNA, 19 nt, Artificial Sequence
  Synthetic
gaugggcugagagauucaa

SEQ ID NO: 2051 - RNA, 19 nt, Artificial Sequence
  Synthetic
ugaugggcugagagauuca

SEQ ID NO: 2052 - RNA, 19 nt, Artificial Sequence
  Synthetic
uugaugggcugagagauuc

SEQ ID NO: 2053 - RNA, 19 nt, Artificial Sequence
  Synthetic
cuugaugggcugagagauu

SEQ ID NO: 2054 - RNA, 19 nt, Artificial Sequence
  Synthetic
gcaaugggaaccaagcuga

SEQ ID NO: 2055 - RNA, 19 nt, Artificial Sequence
  Synthetic
ugcaaugggaaccaagcug

SEQ ID NO: 2056 - RNA, 19 nt, Artificial Sequence
  Synthetic
augcaaugggaaccaagcu

SEQ ID NO: 2057 - RNA, 19 nt, Artificial Sequence
  Synthetic
gaugcaaugggaaccaagc

SEQ ID NO: 2058 - RNA, 19 nt, Artificial Sequence
  Synthetic
agaugcaaugggaaccaag

SEQ ID NO: 2059 - RNA, 19 nt, Artificial Sequence
  Synthetic
gagaugcaaugggaaccaa

SEQ ID NO: 2060 - RNA, 19 nt, Artificial Sequence
  Synthetic
agagaugcaaugggaacca

SEQ ID NO: 2061 - RNA, 19 nt, Artificial Sequence
  Synthetic
gagagaugcaaugggaacc

SEQ ID NO: 2062 - RNA, 19 nt, Artificial Sequence
  Synthetic
ugagagaugcaaugggaac

SEQ ID NO: 2063 - RNA, 19 nt, Artificial Sequence
  Synthetic
cugagagaugcaaugggaa

SEQ ID NO: 2064 - RNA, 19 nt, Artificial Sequence
  Synthetic
gcugagagaugcaauggga

SEQ ID NO: 2065 - RNA, 19 nt, Artificial Sequence
  Synthetic
ggcugagagaugcaauggg

SEQ ID NO: 2066 - RNA, 19 nt, Artificial Sequence
  Synthetic
gggcugagagaugcaaugg

SEQ ID NO: 2067 - RNA, 19 nt, Artificial Sequence
  Synthetic
ugggcugagagaugcaaug

SEQ ID NO: 2068 - RNA, 19 nt, Artificial Sequence
  Synthetic
augggcugagagaugcaau

SEQ ID NO: 2069 - RNA, 19 nt, Artificial Sequence
  Synthetic
gaugggcugagagaugcaa

SEQ ID NO: 2070 - RNA, 19 nt, Artificial Sequence
  Synthetic
ugaugggcugagagaugca

SEQ ID NO: 2071 - RNA, 19 nt, Artificial Sequence
  Synthetic
uugaugggcugagagaugc

SEQ ID NO: 2072 - RNA, 19 nt, Artificial Sequence
  Synthetic
cuugaugggcugagagaug

SEQ ID NO: 2073 - RNA, 19 nt, Artificial Sequence
  Synthetic
gcuucuucuucagaggccc

SEQ ID NO: 2074 - RNA, 19 nt, Artificial Sequence
  Synthetic
ggcuucuucuucagaggcc

SEQ ID NO: 2075 - RNA, 19 nt, Artificial Sequence
  Synthetic
uggcuucuucuucagaggc

SEQ ID NO: 2076 - RNA, 19 nt, Artificial Sequence
  Synthetic
uuggcuucuucuucagagg

SEQ ID NO: 2077 - RNA, 19 nt, Artificial Sequence
  Synthetic
guuggcuucuucuucagag

SEQ ID NO: 2078 - RNA, 19 nt, Artificial Sequence
  Synthetic
gguuggcuucuucuucaga

SEQ ID NO: 2079 - RNA, 19 nt, Artificial Sequence
  Synthetic
ggguuggcuucuucuucag

SEQ ID NO: 2080 - RNA, 19 nt, Artificial Sequence
  Synthetic
uggguuggcuucuucuuca

SEQ ID NO: 2081 - RNA, 19 nt, Artificial Sequence
  Synthetic
cuggguuggcuucuucuuc

SEQ ID NO: 2082 - RNA, 19 nt, Artificial Sequence
  Synthetic
gcuggguuggcuucuucuu

SEQ ID NO: 2083 - RNA, 19 nt, Artificial Sequence
  Synthetic
ugcuggguuggcuucuucu

SEQ ID NO: 2084 - RNA, 19 nt, Artificial Sequence
  Synthetic
cugcuggguuggcuucuuc

SEQ ID NO: 2085 - RNA, 19 nt, Artificial Sequence
  Synthetic
gcugcuggguuggcuucuu

SEQ ID NO: 2086 - RNA, 19 nt, Artificial Sequence
  Synthetic
ggcugcuggguuggcuucu

SEQ ID NO: 2087 - RNA, 19 nt, Artificial Sequence
  Synthetic
uggcugcuggguuggcuuc

SEQ ID NO: 2088 - RNA, 19 nt, Artificial Sequence
  Synthetic
guggcugcuggguuggcuu

SEQ ID NO: 2089 - RNA, 19 nt, Artificial Sequence
  Synthetic
gguggcugcuggguuggcu

SEQ ID NO: 2090 - RNA, 19 nt, Artificial Sequence
  Synthetic
ugguggcugcuggguuggc

SEQ ID NO: 2091 - RNA, 19 nt, Artificial Sequence
  Synthetic
uugguggcugcuggguugg

SEQ ID NO: 2092 - RNA, 19 nt, Artificial Sequence
  Synthetic
ccuucuucuucagaggccc

SEQ ID NO: 2093 - RNA, 19 nt, Artificial Sequence
  Synthetic
gccuucuucuucagaggcc

SEQ ID NO: 2094 - RNA, 19 nt, Artificial Sequence
  Synthetic
ugccuucuucuucagaggc

SEQ ID NO: 2095 - RNA, 19 nt, Artificial Sequence
  Synthetic
uugccuucuucuucagagg

SEQ ID NO: 2096 - RNA, 19 nt, Artificial Sequence
  Synthetic
guugccuucuucuucagag

SEQ ID NO: 2097 - RNA, 19 nt, Artificial Sequence
  Synthetic
gguugccuucuucuucaga

SEQ ID NO: 2098 - RNA, 19 nt, Artificial Sequence
  Synthetic
ggguugccuucuucuucag

SEQ ID NO: 2099 - RNA, 19 nt, Artificial Sequence
  Synthetic
uggguugccuucuucuuca

SEQ ID NO: 2100 - RNA, 19 nt, Artificial Sequence
  Synthetic
cuggguugccuucuucuuc

SEQ ID NO: 2101 - RNA, 19 nt, Artificial Sequence
  Synthetic
gcuggguugccuucuucuu

SEQ ID NO: 2102 - RNA, 19 nt, Artificial Sequence
  Synthetic
ugcuggguugccuucuucu

SEQ ID NO: 2103 - RNA, 19 nt, Artificial Sequence
  Synthetic
cugcuggguugccuucuuc

SEQ ID NO: 2104 - RNA, 19 nt, Artificial Sequence
  Synthetic
gcugcuggguugccuucuu

SEQ ID NO: 2105 - RNA, 19 nt, Artificial Sequence
  Synthetic
ggcugcuggguugccuucu

SEQ ID NO: 2106 - RNA, 19 nt, Artificial Sequence
  Synthetic
uggcugcuggguugccuuc

SEQ ID NO: 2107 - RNA, 19 nt, Artificial Sequence
  Synthetic
guggcugcuggguugccuu

SEQ ID NO: 2108 - RNA, 19 nt, Artificial Sequence
  Synthetic
gguggcugcuggguugccu

SEQ ID NO: 2109 - RNA, 19 nt, Artificial Sequence
  Synthetic
ugguggcugcuggguugcc

SEQ ID NO: 2110 - RNA, 19 nt, Artificial Sequence
  Synthetic
uugguggcugcuggguugc

SEQ ID NO: 2111 - RNA, 19 nt, Artificial Sequence
  Synthetic
gccuuuauugcggguccag

SEQ ID NO: 2112 - RNA, 19 nt, Artificial Sequence
  Synthetic
ugccuuuauugcgggucca

SEQ ID NO: 2113 - RNA, 19 nt, Artificial Sequence
  Synthetic
cugccuuuauugcgggucc

SEQ ID NO: 2114 - RNA, 19 nt, Artificial Sequence
  Synthetic
gcugccuuuauugcggguc

SEQ ID NO: 2115 - RNA, 19 nt, Artificial Sequence
  Synthetic
ggcugccuuuauugcgggu

SEQ ID NO: 2116 - RNA, 19 nt, Artificial Sequence
  Synthetic
aggcugccuuuauugcggg

SEQ ID NO: 2117 - RNA, 19 nt, Artificial Sequence
  Synthetic
aaggcugccuuuauugcgg

SEQ ID NO: 2118 - RNA, 19 nt, Artificial Sequence
  Synthetic
caaggcugccuuuauugcg

SEQ ID NO: 2119 - RNA, 19 nt, Artificial Sequence
  Synthetic
gcaaggcugccuuuauugc

SEQ ID NO: 2120 - RNA, 19 nt, Artificial Sequence
  Synthetic
ggcaaggcugccuuuauug

SEQ ID NO: 2121 - RNA, 19 nt, Artificial Sequence
  Synthetic
aggcaaggcugccuuuauu

SEQ ID NO: 2122 - RNA, 19 nt, Artificial Sequence
  Synthetic
aaggcaaggcugccuuuau

SEQ ID NO: 2123 - RNA, 19 nt, Artificial Sequence
  Synthetic
gaaggcaaggcugccuuua

SEQ ID NO: 2124 - RNA, 19 nt, Artificial Sequence
  Synthetic
agaaggcaaggcugccuuu

SEQ ID NO: 2125 - RNA, 19 nt, Artificial Sequence
  Synthetic
gagaaggcaaggcugccuu

SEQ ID NO: 2126 - RNA, 19 nt, Artificial Sequence
  Synthetic
agagaaggcaaggcugccu

SEQ ID NO: 2127 - RNA, 19 nt, Artificial Sequence
  Synthetic
uagagaaggcaaggcugcc

SEQ ID NO: 2128 - RNA, 19 nt, Artificial Sequence
  Synthetic
uuagagaaggcaaggcugc

SEQ ID NO: 2129 - RNA, 19 nt, Artificial Sequence
  Synthetic
guuagagaaggcaaggcug

SEQ ID NO: 2130 - RNA, 19 nt, Artificial Sequence
  Synthetic
uccuuuauugcggguccag

SEQ ID NO: 2131 - RNA, 19 nt, Artificial Sequence
  Synthetic
uuccuuuauugcgggucca

SEQ ID NO: 2132 - RNA, 19 nt, Artificial Sequence
  Synthetic
cuuccuuuauugcgggucc

SEQ ID NO: 2133 - RNA, 19 nt, Artificial Sequence
  Synthetic
gcuuccuuuauugcggguc

SEQ ID NO: 2134 - RNA, 19 nt, Artificial Sequence
  Synthetic
ggcuuccuuuauugcgggu

SEQ ID NO: 2135 - RNA, 19 nt, Artificial Sequence
  Synthetic
aggcuuccuuuauugcggg

SEQ ID NO: 2136 - RNA, 19 nt, Artificial Sequence
  Synthetic
aaggcuuccuuuauugcgg

SEQ ID NO: 2137 - RNA, 19 nt, Artificial Sequence
  Synthetic
caaggcuuccuuuauugcg

SEQ ID NO: 2138 - RNA, 19 nt, Artificial Sequence
  Synthetic
gcaaggcuuccuuuauugc

SEQ ID NO: 2139 - RNA, 19 nt, Artificial Sequence
  Synthetic
ggcaaggcuuccuuuauug

SEQ ID NO: 2140 - RNA, 19 nt, Artificial Sequence
  Synthetic
aggcaaggcuuccuuuauu

SEQ ID NO: 2141 - RNA, 19 nt, Artificial Sequence
  Synthetic
aaggcaaggcuuccuuuau

SEQ ID NO: 2142 - RNA, 19 nt, Artificial Sequence
  Synthetic
gaaggcaaggcuuccuuua

SEQ ID NO: 2143 - RNA, 19 nt, Artificial Sequence
  Synthetic
agaaggcaaggcuuccuuu

SEQ ID NO: 2144 - RNA, 19 nt, Artificial Sequence
  Synthetic
gagaaggcaaggcuuccuu

SEQ ID NO: 2145 - RNA, 19 nt, Artificial Sequence
  Synthetic
agagaaggcaaggcuuccu

SEQ ID NO: 2146 - RNA, 19 nt, Artificial Sequence
  Synthetic
uagagaaggcaaggcuucc

SEQ ID NO: 2147 - RNA, 19 nt, Artificial Sequence
  Synthetic
uuagagaaggcaaggcuuc

SEQ ID NO: 2148 - RNA, 19 nt, Artificial Sequence
  Synthetic
guuagagaaggcaaggcuu

SEQ ID NO: 2149 - RNA, 19 nt, Artificial Sequence
  Synthetic
uguuagagaaggcaaggcu

SEQ ID NO: 2150 - RNA, 19 nt, Artificial Sequence
  Synthetic
uuguuagagaaggcaaggc

SEQ ID NO: 2151 - RNA, 19 nt, Artificial Sequence
  Synthetic
uuuguuagagaaggcaagg

SEQ ID NO: 2152 - RNA, 19 nt, Artificial Sequence
  Synthetic
guuuguuagagaaggcaag

SEQ ID NO: 2153 - RNA, 19 nt, Artificial Sequence
  Synthetic
gguuuguuagagaaggcaa

SEQ ID NO: 2154 - RNA, 19 nt, Artificial Sequence
  Synthetic
ggguuuguuagagaaggca

SEQ ID NO: 2155 - RNA, 19 nt, Artificial Sequence
  Synthetic
gggguuuguuagagaaggc

SEQ ID NO: 2156 - RNA, 19 nt, Artificial Sequence
  Synthetic
ggggguuuguuagagaagg

SEQ ID NO: 2157 - RNA, 19 nt, Artificial Sequence
  Synthetic
gggggguuuguuagagaag

SEQ ID NO: 2158 - RNA, 19 nt, Artificial Sequence
  Synthetic
agggggguuuguuagagaa

SEQ ID NO: 2159 - RNA, 19 nt, Artificial Sequence
  Synthetic
aagggggguuuguuagaga

SEQ ID NO: 2160 - RNA, 19 nt, Artificial Sequence
  Synthetic
gaagggggguuuguuagag

SEQ ID NO: 2161 - RNA, 19 nt, Artificial Sequence
  Synthetic
agaagggggguuuguuaga

SEQ ID NO: 2162 - RNA, 19 nt, Artificial Sequence
  Synthetic
gagaagggggguuuguuag

SEQ ID NO: 2163 - RNA, 19 nt, Artificial Sequence
  Synthetic
agagaagggggguuuguua

SEQ ID NO: 2164 - RNA, 19 nt, Artificial Sequence
  Synthetic
uagagaagggggguuuguu

SEQ ID NO: 2165 - RNA, 19 nt, Artificial Sequence
  Synthetic
uuagagaagggggguuugu

SEQ ID NO: 2166 - RNA, 19 nt, Artificial Sequence
  Synthetic
cuagagaaggcaaggcugc

SEQ ID NO: 2167 - RNA, 19 nt, Artificial Sequence
  Synthetic
gcuagagaaggcaaggcug

SEQ ID NO: 2168 - RNA, 19 nt, Artificial Sequence
  Synthetic
ugcuagagaaggcaaggcu

SEQ ID NO: 2169 - RNA, 19 nt, Artificial Sequence
  Synthetic
uugcuagagaaggcaaggc

SEQ ID NO: 2170 - RNA, 19 nt, Artificial Sequence
  Synthetic
uuugcuagagaaggcaagg

SEQ ID NO: 2171 - RNA, 19 nt, Artificial Sequence
  Synthetic
guuugcuagagaaggcaag

SEQ ID NO: 2172 - RNA, 19 nt, Artificial Sequence
  Synthetic
gguuugcuagagaaggcaa

SEQ ID NO: 2173 - RNA, 19 nt, Artificial Sequence
  Synthetic
ggguuugcuagagaaggca

SEQ ID NO: 2174 - RNA, 19 nt, Artificial Sequence
  Synthetic
gggguuugcuagagaaggc

SEQ ID NO: 2175 - RNA, 19 nt, Artificial Sequence
  Synthetic
ggggguuugcuagagaagg

SEQ ID NO: 2176 - RNA, 19 nt, Artificial Sequence
  Synthetic
gggggguuugcuagagaag

SEQ ID NO: 2177 - RNA, 19 nt, Artificial Sequence
  Synthetic
agggggguuugcuagagaa

SEQ ID NO: 2178 - RNA, 19 nt, Artificial Sequence
  Synthetic
aagggggguuugcuagaga

SEQ ID NO: 2179 - RNA, 19 nt, Artificial Sequence
  Synthetic
gaagggggguuugcuagag

SEQ ID NO: 2180 - RNA, 19 nt, Artificial Sequence
  Synthetic
agaagggggguuugcuaga

SEQ ID NO: 2181 - RNA, 19 nt, Artificial Sequence
  Synthetic
gagaagggggguuugcuag

SEQ ID NO: 2182 - RNA, 19 nt, Artificial Sequence
  Synthetic
agagaagggggguuugcua

SEQ ID NO: 2183 - RNA, 19 nt, Artificial Sequence
  Synthetic
uagagaagggggguuugcu

SEQ ID NO: 2184 - RNA, 19 nt, Artificial Sequence
  Synthetic
uuagagaagggggguuugc

SEQ ID NO: 2185 - RNA, 19 nt, Artificial Sequence
  Synthetic
gagaaacccuccaaacuuu

SEQ ID NO: 2186 - RNA, 19 nt, Artificial Sequence
  Synthetic
ggagaaacccuccaaacuu

SEQ ID NO: 2187 - RNA, 19 nt, Artificial Sequence
  Synthetic
cggagaaacccuccaaacu

SEQ ID NO: 2188 - RNA, 19 nt, Artificial Sequence
  Synthetic
gcggagaaacccuccaaac

SEQ ID NO: 2189 - RNA, 19 nt, Artificial Sequence
  Synthetic
agcggagaaacccuccaaa

SEQ ID NO: 2190 - RNA, 19 nt, Artificial Sequence
  Synthetic
gagcggagaaacccuccaa

SEQ ID NO: 2191 - RNA, 19 nt, Artificial Sequence
  Synthetic
ugagcggagaaacccucca

SEQ ID NO: 2192 - RNA, 19 nt, Artificial Sequence
  Synthetic
cugagcggagaaacccucc

SEQ ID NO: 2193 - RNA, 19 nt, Artificial Sequence
  Synthetic
gcugagcggagaaacccuc

SEQ ID NO: 2194 - RNA, 19 nt, Artificial Sequence
  Synthetic
ggcugagcggagaaacccu

SEQ ID NO: 2195 - RNA, 19 nt, Artificial Sequence
  Synthetic
aggcugagcggagaaaccc

SEQ ID NO: 2196 - RNA, 19 nt, Artificial Sequence
  Synthetic
aaggcugagcggagaaacc

SEQ ID NO: 2197 - RNA, 19 nt, Artificial Sequence
  Synthetic
caaggcugagcggagaaac

SEQ ID NO: 2198 - RNA, 19 nt, Artificial Sequence
  Synthetic
ccaaggcugagcggagaaa

SEQ ID NO: 2199 - RNA, 19 nt, Artificial Sequence
  Synthetic
uccaaggcugagcggagaa

SEQ ID NO: 2200 - RNA, 19 nt, Artificial Sequence
  Synthetic
auccaaggcugagcggaga

SEQ ID NO: 2201 - RNA, 19 nt, Artificial Sequence
  Synthetic
cauccaaggcugagcggag

SEQ ID NO: 2202 - RNA, 19 nt, Artificial Sequence
  Synthetic
acauccaaggcugagcgga

SEQ ID NO: 2203 - RNA, 19 nt, Artificial Sequence
  Synthetic
aacauccaaggcugagcgg

SEQ ID NO: 2204 - RNA, 19 nt, Artificial Sequence
  Synthetic
aagaaacccuccaaacuuu

SEQ ID NO: 2205 - RNA, 19 nt, Artificial Sequence
  Synthetic
gaagaaacccuccaaacuu

SEQ ID NO: 2206 - RNA, 19 nt, Artificial Sequence
  Synthetic
cgaagaaacccuccaaacu

SEQ ID NO: 2207 - RNA, 19 nt, Artificial Sequence
  Synthetic
gcgaagaaacccuccaaac

SEQ ID NO: 2208 - RNA, 19 nt, Artificial Sequence
  Synthetic
agcgaagaaacccuccaaa

SEQ ID NO: 2209 - RNA, 19 nt, Artificial Sequence
  Synthetic
gagcgaagaaacccuccaa

SEQ ID NO: 2210 - RNA, 19 nt, Artificial Sequence
  Synthetic
ugagcgaagaaacccucca

SEQ ID NO: 2211 - RNA, 19 nt, Artificial Sequence
  Synthetic
cugagcgaagaaacccucc

SEQ ID NO: 2212 - RNA, 19 nt, Artificial Sequence
  Synthetic
gcugagcgaagaaacccuc

SEQ ID NO: 2213 - RNA, 19 nt, Artificial Sequence
  Synthetic
ggcugagcgaagaaacccu

SEQ ID NO: 2214 - RNA, 19 nt, Artificial Sequence
  Synthetic
aggcugagcgaagaaaccc

SEQ ID NO: 2215 - RNA, 19 nt, Artificial Sequence
  Synthetic
aaggcugagcgaagaaacc

SEQ ID NO: 2216 - RNA, 19 nt, Artificial Sequence
  Synthetic
caaggcugagcgaagaaac

SEQ ID NO: 2217 - RNA, 19 nt, Artificial Sequence
  Synthetic
ccaaggcugagcgaagaaa

SEQ ID NO: 2218 - RNA, 19 nt, Artificial Sequence
  Synthetic
uccaaggcugagcgaagaa

SEQ ID NO: 2219 - RNA, 19 nt, Artificial Sequence
  Synthetic
auccaaggcugagcgaaga

SEQ ID NO: 2220 - RNA, 19 nt, Artificial Sequence
  Synthetic
cauccaaggcugagcgaag

SEQ ID NO: 2221 - RNA, 19 nt, Artificial Sequence
  Synthetic
acauccaaggcugagcgaa

SEQ ID NO: 2222 - RNA, 19 nt, Artificial Sequence
  Synthetic
aacauccaaggcugagcga

SEQ ID NO: 2223 - RNA, 19 nt, Artificial Sequence
  Synthetic
ucuccugcuccgccugcac

SEQ ID NO: 2224 - RNA, 19 nt, Artificial Sequence
  Synthetic
uucuccugcuccgccugca

SEQ ID NO: 2225 - RNA, 19 nt, Artificial Sequence
  Synthetic
guucuccugcuccgccugc

SEQ ID NO: 2226 - RNA, 19 nt, Artificial Sequence
  Synthetic
cguucuccugcuccgccug

SEQ ID NO: 2227 - RNA, 19 nt, Artificial Sequence
  Synthetic
ucguucuccugcuccgccu

SEQ ID NO: 2228 - RNA, 19 nt, Artificial Sequence
  Synthetic
gucguucuccugcuccgcc

SEQ ID NO: 2229 - RNA, 19 nt, Artificial Sequence
  Synthetic
ugucguucuccugcuccgc

SEQ ID NO: 2230 - RNA, 19 nt, Artificial Sequence
  Synthetic
gugucguucuccugcuccg

SEQ ID NO: 2231 - RNA, 19 nt, Artificial Sequence
  Synthetic
ggugucguucuccugcucc

SEQ ID NO: 2232 - RNA, 19 nt, Artificial Sequence
  Synthetic
aggugucguucuccugcuc

SEQ ID NO: 2233 - RNA, 19 nt, Artificial Sequence
  Synthetic
gaggugucguucuccugcu

SEQ ID NO: 2234 - RNA, 19 nt, Artificial Sequence
  Synthetic
cgaggugucguucuccugc

SEQ ID NO: 2235 - RNA, 19 nt, Artificial Sequence
  Synthetic
ccgaggugucguucuccug

SEQ ID NO: 2236 - RNA, 19 nt, Artificial Sequence
  Synthetic
cccgaggugucguucuccu

SEQ ID NO: 2237 - RNA, 19 nt, Artificial Sequence
  Synthetic
ucccgaggugucguucucc

SEQ ID NO: 2238 - RNA, 19 nt, Artificial Sequence
  Synthetic
aucccgaggugucguucuc

SEQ ID NO: 2239 - RNA, 19 nt, Artificial Sequence
  Synthetic
caucccgaggugucguucu

SEQ ID NO: 2240 - RNA, 19 nt, Artificial Sequence
  Synthetic
ccaucccgaggugucguuc

SEQ ID NO: 2241 - RNA, 19 nt, Artificial Sequence
  Synthetic
accaucccgaggugucguu

SEQ ID NO: 2242 - RNA, 19 nt, Artificial Sequence
  Synthetic
gcuccugcuccgccugcac

SEQ ID NO: 2243 - RNA, 19 nt, Artificial Sequence
  Synthetic
ugcuccugcuccgccugca

SEQ ID NO: 2244 - RNA, 19 nt, Artificial Sequence
  Synthetic
gugcuccugcuccgccugc

SEQ ID NO: 2245 - RNA, 19 nt, Artificial Sequence
  Synthetic
cgugcuccugcuccgccug

SEQ ID NO: 2246 - RNA, 19 nt, Artificial Sequence
  Synthetic
ucgugcuccugcuccgccu

SEQ ID NO: 2247 - RNA, 19 nt, Artificial Sequence
  Synthetic
gucgugcuccugcuccgcc

SEQ ID NO: 2248 - RNA, 19 nt, Artificial Sequence
  Synthetic
ugucgugcuccugcuccgc

SEQ ID NO: 2249 - RNA, 19 nt, Artificial Sequence
  Synthetic
gugucgugcuccugcuccg

SEQ ID NO: 2250 - RNA, 19 nt, Artificial Sequence
  Synthetic
ggugucgugcuccugcucc

SEQ ID NO: 2251 - RNA, 19 nt, Artificial Sequence
  Synthetic
aggugucgugcuccugcuc

SEQ ID NO: 2252 - RNA, 19 nt, Artificial Sequence
  Synthetic
gaggugucgugcuccugcu

SEQ ID NO: 2253 - RNA, 19 nt, Artificial Sequence
  Synthetic
cgaggugucgugcuccugc

SEQ ID NO: 2254 - RNA, 19 nt, Artificial Sequence
  Synthetic
ccgaggugucgugcuccug

SEQ ID NO: 2255 - RNA, 19 nt, Artificial Sequence
  Synthetic
cccgaggugucgugcuccu

SEQ ID NO: 2256 - RNA, 19 nt, Artificial Sequence
  Synthetic
ucccgaggugucgugcucc

SEQ ID NO: 2257 - RNA, 19 nt, Artificial Sequence
  Synthetic
aucccgaggugucgugcuc

SEQ ID NO: 2258 - RNA, 19 nt, Artificial Sequence
  Synthetic
caucccgaggugucgugcu

SEQ ID NO: 2259 - RNA, 19 nt, Artificial Sequence
  Synthetic
ccaucccgaggugucgugc

SEQ ID NO: 2260 - RNA, 19 nt, Artificial Sequence
  Synthetic
accaucccgaggugucgug

SEQ ID NO: 2261 - RNA, 19 nt, Artificial Sequence
  Synthetic
guuccucuuaauacaaaga

SEQ ID NO: 2262 - RNA, 19 nt, Artificial Sequence
  Synthetic
uguuccucuuaauacaaag

SEQ ID NO: 2263 - RNA, 19 nt, Artificial Sequence
  Synthetic
uuguuccucuuaauacaaa

SEQ ID NO: 2264 - RNA, 19 nt, Artificial Sequence
  Synthetic
uuuguuccucuuaauacaa

SEQ ID NO: 2265 - RNA, 19 nt, Artificial Sequence
  Synthetic
auuuguuccucuuaauaca

SEQ ID NO: 2266 - RNA, 19 nt, Artificial Sequence
  Synthetic
uauuuguuccucuuaauac

SEQ ID NO: 2267 - RNA, 19 nt, Artificial Sequence
  Synthetic
uuauuuguuccucuuaaua

SEQ ID NO: 2268 - RNA, 19 nt, Artificial Sequence
  Synthetic
uuuauuuguuccucuuaau

SEQ ID NO: 2269 - RNA, 19 nt, Artificial Sequence
  Synthetic
cuuuauuuguuccucuuaa

SEQ ID NO: 2270 - RNA, 19 nt, Artificial Sequence
  Synthetic
gcuuuauuuguuccucuua

SEQ ID NO: 2271 - RNA, 19 nt, Artificial Sequence
  Synthetic
agcuuuauuuguuccucuu

SEQ ID NO: 2272 - RNA, 19 nt, Artificial Sequence
  Synthetic
cagcuuuauuuguuccucu

SEQ ID NO: 2273 - RNA, 19 nt, Artificial Sequence
  Synthetic
ucagcuuuauuuguuccuc

SEQ ID NO: 2274 - RNA, 19 nt, Artificial Sequence
  Synthetic
aucagcuuuauuuguuccu

SEQ ID NO: 2275 - RNA, 19 nt, Artificial Sequence
  Synthetic
caucagcuuuauuuguucc

SEQ ID NO: 2276 - RNA, 19 nt, Artificial Sequence
  Synthetic
gcaucagcuuuauuuguuc

SEQ ID NO: 2277 - RNA, 19 nt, Artificial Sequence
  Synthetic
ugcaucagcuuuauuuguu

SEQ ID NO: 2278 - RNA, 19 nt, Artificial Sequence
  Synthetic
cugcaucagcuuuauuugu

SEQ ID NO: 2279 - RNA, 19 nt, Artificial Sequence
  Synthetic
ccugcaucagcuuuauuug

SEQ ID NO: 2280 - RNA, 19 nt, Artificial Sequence
  Synthetic
auuccucuuaauacaaaga

SEQ ID NO: 2281 - RNA, 19 nt, Artificial Sequence
  Synthetic
uauuccucuuaauacaaag

SEQ ID NO: 2282 - RNA, 19 nt, Artificial Sequence
  Synthetic
uuauuccucuuaauacaaa

SEQ ID NO: 2283 - RNA, 19 nt, Artificial Sequence
  Synthetic
uuuauuccucuuaauacaa

SEQ ID NO: 2284 - RNA, 19 nt, Artificial Sequence
  Synthetic
auuuauuccucuuaauaca

SEQ ID NO: 2285 - RNA, 19 nt, Artificial Sequence
  Synthetic
uauuuauuccucuuaauac

SEQ ID NO: 2286 - RNA, 19 nt, Artificial Sequence
  Synthetic
uuauuuauuccucuuaaua

SEQ ID NO: 2287 - RNA, 19 nt, Artificial Sequence
  Synthetic
uuuauuuauuccucuuaau

SEQ ID NO: 2288 - RNA, 19 nt, Artificial Sequence
  Synthetic
cuuuauuuauuccucuuaa

SEQ ID NO: 2289 - RNA, 19 nt, Artificial Sequence
  Synthetic
gcuuuauuuauuccucuua

SEQ ID NO: 2290 - RNA, 19 nt, Artificial Sequence
  Synthetic
agcuuuauuuauuccucuu

SEQ ID NO: 2291 - RNA, 19 nt, Artificial Sequence
  Synthetic
cagcuuuauuuauuccucu

SEQ ID NO: 2292 - RNA, 19 nt, Artificial Sequence
  Synthetic
ucagcuuuauuuauuccuc

SEQ ID NO: 2293 - RNA, 19 nt, Artificial Sequence
  Synthetic
aucagcuuuauuuauuccu

SEQ ID NO: 2294 - RNA, 19 nt, Artificial Sequence
  Synthetic
caucagcuuuauuuauucc

SEQ ID NO: 2295 - RNA, 19 nt, Artificial Sequence
  Synthetic
gcaucagcuuuauuuauuc

SEQ ID NO: 2296 - RNA, 19 nt, Artificial Sequence
  Synthetic
ugcaucagcuuuauuuauu

SEQ ID NO: 2297 - RNA, 19 nt, Artificial Sequence
  Synthetic
cugcaucagcuuuauuuau

SEQ ID NO: 2298 - RNA, 19 nt, Artificial Sequence
  Synthetic
ccugcaucagcuuuauuua

SEQ ID NO: 2299 - RNA, 19 nt, Artificial Sequence
  Synthetic
guacuguccccaucucuua

SEQ ID NO: 2300 - RNA, 19 nt, Artificial Sequence
  Synthetic
aguacuguccccaucucuu

SEQ ID NO: 2301 - RNA, 19 nt, Artificial Sequence
  Synthetic
aaguacuguccccaucucu

SEQ ID NO: 2302 - RNA, 19 nt, Artificial Sequence
  Synthetic
gaaguacuguccccaucuc

SEQ ID NO: 2303 - RNA, 19 nt, Artificial Sequence
  Synthetic
ugaaguacuguccccaucu

SEQ ID NO: 2304 - RNA, 19 nt, Artificial Sequence
  Synthetic
uugaaguacuguccccauc

SEQ ID NO: 2305 - RNA, 19 nt, Artificial Sequence
  Synthetic
guugaaguacuguccccau

SEQ ID NO: 2306 - RNA, 19 nt, Artificial Sequence
  Synthetic
cguugaaguacugucccca

SEQ ID NO: 2307 - RNA, 19 nt, Artificial Sequence
  Synthetic
gcguugaaguacugucccc

SEQ ID NO: 2308 - RNA, 19 nt, Artificial Sequence
  Synthetic
agcguugaaguacuguccc

SEQ ID NO: 2309 - RNA, 19 nt, Artificial Sequence
  Synthetic
uagcguugaaguacugucc

SEQ ID NO: 2310 - RNA, 19 nt, Artificial Sequence
  Synthetic
cuagcguugaaguacuguc

SEQ ID NO: 2311 - RNA, 19 nt, Artificial Sequence
  Synthetic
ucuagcguugaaguacugu

SEQ ID NO: 2312 - RNA, 19 nt, Artificial Sequence
  Synthetic
uucuagcguugaaguacug

SEQ ID NO: 2313 - RNA, 19 nt, Artificial Sequence
  Synthetic
cuucuagcguugaaguacu

SEQ ID NO: 2314 - RNA, 19 nt, Artificial Sequence
  Synthetic
ucuucuagcguugaaguac

SEQ ID NO: 2315 - RNA, 19 nt, Artificial Sequence
  Synthetic
uucuucuagcguugaagua

SEQ ID NO: 2316 - RNA, 19 nt, Artificial Sequence
  Synthetic
guucuucuagcguugaagu

SEQ ID NO: 2317 - RNA, 19 nt, Artificial Sequence
  Synthetic
uguucuucuagcguugaag

SEQ ID NO: 2318 - RNA, 19 nt, Artificial Sequence
  Synthetic
uuacuguccccaucucuua

SEQ ID NO: 2319 - RNA, 19 nt, Artificial Sequence
  Synthetic
auuacuguccccaucucuu

SEQ ID NO: 2320 - RNA, 19 nt, Artificial Sequence
  Synthetic
aauuacuguccccaucucu

SEQ ID NO: 2321 - RNA, 19 nt, Artificial Sequence
  Synthetic
gaauuacuguccccaucuc

SEQ ID NO: 2322 - RNA, 19 nt, Artificial Sequence
  Synthetic
ugaauuacuguccccaucu

SEQ ID NO: 2323 - RNA, 19 nt, Artificial Sequence
  Synthetic
uugaauuacuguccccauc

SEQ ID NO: 2324 - RNA, 19 nt, Artificial Sequence
  Synthetic
guugaauuacuguccccau

SEQ ID NO: 2325 - RNA, 19 nt, Artificial Sequence
  Synthetic
cguugaauuacugucccca

SEQ ID NO: 2326 - RNA, 19 nt, Artificial Sequence
  Synthetic
gcguugaauuacugucccc

SEQ ID NO: 2327 - RNA, 19 nt, Artificial Sequence
  Synthetic
agcguugaauuacuguccc

SEQ ID NO: 2328 - RNA, 19 nt, Artificial Sequence
  Synthetic
uagcguugaauuacugucc

SEQ ID NO: 2329 - RNA, 19 nt, Artificial Sequence
  Synthetic
cuagcguugaauuacuguc

SEQ ID NO: 2330 - RNA, 19 nt, Artificial Sequence
  Synthetic
ucuagcguugaauuacugu

SEQ ID NO: 2331 - RNA, 19 nt, Artificial Sequence
  Synthetic
uucuagcguugaauuacug

SEQ ID NO: 2332 - RNA, 19 nt, Artificial Sequence
  Synthetic
cuucuagcguugaauuacu

SEQ ID NO: 2333 - RNA, 19 nt, Artificial Sequence
  Synthetic
ucuucuagcguugaauuac

SEQ ID NO: 2334 - RNA, 19 nt, Artificial Sequence
  Synthetic
uucuucuagcguugaauua

SEQ ID NO: 2335 - RNA, 19 nt, Artificial Sequence
  Synthetic
guucuucuagcguugaauu

SEQ ID NO: 2336 - RNA, 19 nt, Artificial Sequence
  Synthetic
uguucuucuagcguugaau

SEQ ID NO: 2337 - RNA, 19 nt, Artificial Sequence
  Synthetic
cucugcaggcagcucgggc

SEQ ID NO: 2338 - RNA, 19 nt, Artificial Sequence
  Synthetic
gcucugcaggcagcucggg

SEQ ID NO: 2339 - RNA, 19 nt, Artificial Sequence
  Synthetic
ggcucugcaggcagcucgg

SEQ ID NO: 2340 - RNA, 19 nt, Artificial Sequence
  Synthetic
cggcucugcaggcagcucg

SEQ ID NO: 2341 - RNA, 19 nt, Artificial Sequence
  Synthetic
ccggcucugcaggcagcuc

SEQ ID NO: 2342 - RNA, 19 nt, Artificial Sequence
  Synthetic
gccggcucugcaggcagcu

SEQ ID NO: 2343 - RNA, 19 nt, Artificial Sequence
  Synthetic
cgccggcucugcaggcagc

SEQ ID NO: 2344 - RNA, 19 nt, Artificial Sequence
  Synthetic
ccgccggcucugcaggcag

SEQ ID NO: 2345 - RNA, 19 nt, Artificial Sequence
  Synthetic
gccgccggcucugcaggca

SEQ ID NO: 2346 - RNA, 19 nt, Artificial Sequence
  Synthetic
ggccgccggcucugcaggc

SEQ ID NO: 2347 - RNA, 19 nt, Artificial Sequence
  Synthetic
aggccgccggcucugcagg

SEQ ID NO: 2348 - RNA, 19 nt, Artificial Sequence
  Synthetic
uaggccgccggcucugcag

SEQ ID NO: 2349 - RNA, 19 nt, Artificial Sequence
  Synthetic
guaggccgccggcucugca

SEQ ID NO: 2350 - RNA, 19 nt, Artificial Sequence
  Synthetic
aguaggccgccggcucugc

SEQ ID NO: 2351 - RNA, 19 nt, Artificial Sequence
  Synthetic
caguaggccgccggcucug

SEQ ID NO: 2352 - RNA, 19 nt, Artificial Sequence
  Synthetic
ccaguaggccgccggcucu

SEQ ID NO: 2353 - RNA, 19 nt, Artificial Sequence
  Synthetic
uccaguaggccgccggcuc

SEQ ID NO: 2354 - RNA, 19 nt, Artificial Sequence
  Synthetic
cuccaguaggccgccggcu

SEQ ID NO: 2355 - RNA, 19 nt, Artificial Sequence
  Synthetic
gcuccaguaggccgccggc

SEQ ID NO: 2356 - RNA, 19 nt, Artificial Sequence
  Synthetic
uucugcaggcagcucgggc

SEQ ID NO: 2357 - RNA, 19 nt, Artificial Sequence
  Synthetic
guucugcaggcagcucggg

SEQ ID NO: 2358 - RNA, 19 nt, Artificial Sequence
  Synthetic
gguucugcaggcagcucgg

SEQ ID NO: 2359 - RNA, 19 nt, Artificial Sequence
  Synthetic
cgguucugcaggcagcucg

SEQ ID NO: 2360 - RNA, 19 nt, Artificial Sequence
  Synthetic
ccgguucugcaggcagcuc

SEQ ID NO: 2361 - RNA, 19 nt, Artificial Sequence
  Synthetic
gccgguucugcaggcagcu

SEQ ID NO: 2362 - RNA, 19 nt, Artificial Sequence
  Synthetic
cgccgguucugcaggcagc

SEQ ID NO: 2363 - RNA, 19 nt, Artificial Sequence
  Synthetic
ccgccgguucugcaggcag

SEQ ID NO: 2364 - RNA, 19 nt, Artificial Sequence
  Synthetic
gccgccgguucugcaggca

SEQ ID NO: 2365 - RNA, 19 nt, Artificial Sequence
  Synthetic
ggccgccgguucugcaggc

SEQ ID NO: 2366 - RNA, 19 nt, Artificial Sequence
  Synthetic
aggccgccgguucugcagg

SEQ ID NO: 2367 - RNA, 19 nt, Artificial Sequence
  Synthetic
uaggccgccgguucugcag

SEQ ID NO: 2368 - RNA, 19 nt, Artificial Sequence
  Synthetic
guaggccgccgguucugca

SEQ ID NO: 2369 - RNA, 19 nt, Artificial Sequence
  Synthetic
aguaggccgccgguucugc

SEQ ID NO: 2370 - RNA, 19 nt, Artificial Sequence
  Synthetic
caguaggccgccgguucug

SEQ ID NO: 2371 - RNA, 19 nt, Artificial Sequence
  Synthetic
ccaguaggccgccgguucu

SEQ ID NO: 2372 - RNA, 19 nt, Artificial Sequence
  Synthetic
uccaguaggccgccgguuc

SEQ ID NO: 2373 - RNA, 19 nt, Artificial Sequence
  Synthetic
cuccaguaggccgccgguu

SEQ ID NO: 2374 - RNA, 19 nt, Artificial Sequence
  Synthetic
gcuccaguaggccgccggu

SEQ ID NO: 2375 - RNA, 19 nt, Artificial Sequence
  Synthetic
agaugagggagcaggcgug

SEQ ID NO: 2376 - RNA, 19 nt, Artificial Sequence
  Synthetic
uagaugagggagcaggcgu

SEQ ID NO: 2377 - RNA, 19 nt, Artificial Sequence
  Synthetic
guagaugagggagcaggcg

SEQ ID NO: 2378 - RNA, 19 nt, Artificial Sequence
  Synthetic
aguagaugagggagcaggc

SEQ ID NO: 2379 - RNA, 19 nt, Artificial Sequence
  Synthetic
caguagaugagggagcagg

SEQ ID NO: 2380 - RNA, 19 nt, Artificial Sequence
  Synthetic
acaguagaugagggagcag

SEQ ID NO: 2381 - RNA, 19 nt, Artificial Sequence
  Synthetic
cacaguagaugagggagca

SEQ ID NO: 2382 - RNA, 19 nt, Artificial Sequence
  Synthetic
acacaguagaugagggagc

SEQ ID NO: 2383 - RNA, 19 nt, Artificial Sequence
  Synthetic
cacacaguagaugagggag

SEQ ID NO: 2384 - RNA, 19 nt, Artificial Sequence
  Synthetic
gcacacaguagaugaggga

SEQ ID NO: 2385 - RNA, 19 nt, Artificial Sequence
  Synthetic
ugcacacaguagaugaggg

SEQ ID NO: 2386 - RNA, 19 nt, Artificial Sequence
  Synthetic
gugcacacaguagaugagg

SEQ ID NO: 2387 - RNA, 19 nt, Artificial Sequence
  Synthetic
agugcacacaguagaugag

SEQ ID NO: 2388 - RNA, 19 nt, Artificial Sequence
  Synthetic
aagugcacacaguagauga

SEQ ID NO: 2389 - RNA, 19 nt, Artificial Sequence
  Synthetic
gaagugcacacaguagaug

SEQ ID NO: 2390 - RNA, 19 nt, Artificial Sequence
  Synthetic
ugaagugcacacaguagau

SEQ ID NO: 2391 - RNA, 19 nt, Artificial Sequence
  Synthetic
augaagugcacacaguaga

SEQ ID NO: 2392 - RNA, 19 nt, Artificial Sequence
  Synthetic
gaugaagugcacacaguag

SEQ ID NO: 2393 - RNA, 19 nt, Artificial Sequence
  Synthetic
ggaugaagugcacacagua

SEQ ID NO: 2394 - RNA, 19 nt, Artificial Sequence
  Synthetic
ggaugagggagcaggcgug

SEQ ID NO: 2395 - RNA, 19 nt, Artificial Sequence
  Synthetic
uggaugagggagcaggcgu

SEQ ID NO: 2396 - RNA, 19 nt, Artificial Sequence
  Synthetic
guggaugagggagcaggcg

SEQ ID NO: 2397 - RNA, 19 nt, Artificial Sequence
  Synthetic
aguggaugagggagcaggc

SEQ ID NO: 2398 - RNA, 19 nt, Artificial Sequence
  Synthetic
caguggaugagggagcagg

SEQ ID NO: 2399 - RNA, 19 nt, Artificial Sequence
  Synthetic
acaguggaugagggagcag

SEQ ID NO: 2400 - RNA, 19 nt, Artificial Sequence
  Synthetic
cacaguggaugagggagca

SEQ ID NO: 2401 - RNA, 19 nt, Artificial Sequence
  Synthetic
acacaguggaugagggagc

SEQ ID NO: 2402 - RNA, 19 nt, Artificial Sequence
  Synthetic
cacacaguggaugagggag

SEQ ID NO: 2403 - RNA, 19 nt, Artificial Sequence
  Synthetic
gcacacaguggaugaggga

SEQ ID NO: 2404 - RNA, 19 nt, Artificial Sequence
  Synthetic
ugcacacaguggaugaggg

SEQ ID NO: 2405 - RNA, 19 nt, Artificial Sequence
  Synthetic
gugcacacaguggaugagg

SEQ ID NO: 2406 - RNA, 19 nt, Artificial Sequence
  Synthetic
agugcacacaguggaugag

SEQ ID NO: 2407 - RNA, 19 nt, Artificial Sequence
  Synthetic
aagugcacacaguggauga

SEQ ID NO: 2408 - RNA, 19 nt, Artificial Sequence
  Synthetic
gaagugcacacaguggaug

SEQ ID NO: 2409 - RNA, 19 nt, Artificial Sequence
  Synthetic
ugaagugcacacaguggau

SEQ ID NO: 2410 - RNA, 19 nt, Artificial Sequence
  Synthetic
augaagugcacacagugga

SEQ ID NO: 2411 - RNA, 19 nt, Artificial Sequence
  Synthetic
gaugaagugcacacagugg

SEQ ID NO: 2412 - RNA, 19 nt, Artificial Sequence
  Synthetic
ggaugaagugcacacagug

SEQ ID NO: 2413 - RNA, 19 nt, Artificial Sequence
  Synthetic
cuuaggauucuguguguuu

SEQ ID NO: 2414 - RNA, 19 nt, Artificial Sequence
  Synthetic
acuuaggauucuguguguu

SEQ ID NO: 2415 - RNA, 19 nt, Artificial Sequence
  Synthetic
uacuuaggauucugugugu

SEQ ID NO: 2416 - RNA, 19 nt, Artificial Sequence
  Synthetic
auacuuaggauucugugug

SEQ ID NO: 2417 - RNA, 19 nt, Artificial Sequence
  Synthetic
uauacuuaggauucugugu

SEQ ID NO: 2418 - RNA, 19 nt, Artificial Sequence
  Synthetic
auauacuuaggauucugug

SEQ ID NO: 2419 - RNA, 19 nt, Artificial Sequence
  Synthetic
gauauacuuaggauucugu

SEQ ID NO: 2420 - RNA, 19 nt, Artificial Sequence
  Synthetic
ugauauacuuaggauucug

SEQ ID NO: 2421 - RNA, 19 nt, Artificial Sequence
  Synthetic
gugauauacuuaggauucu

SEQ ID NO: 2422 - RNA, 19 nt, Artificial Sequence
  Synthetic
agugauauacuuaggauuc

SEQ ID NO: 2423 - RNA, 19 nt, Artificial Sequence
  Synthetic
cagugauauacuuaggauu

SEQ ID NO: 2424 - RNA, 19 nt, Artificial Sequence
  Synthetic
gcagugauauacuuaggau

SEQ ID NO: 2425 - RNA, 19 nt, Artificial Sequence
  Synthetic
ugcagugauauacuuagga

SEQ ID NO: 2426 - RNA, 19 nt, Artificial Sequence
  Synthetic
cugcagugauauacuuagg

SEQ ID NO: 2427 - RNA, 19 nt, Artificial Sequence
  Synthetic
gcugcagugauauacuuag

SEQ ID NO: 2428 - RNA, 19 nt, Artificial Sequence
  Synthetic
ggcugcagugauauacuua

SEQ ID NO: 2429 - RNA, 19 nt, Artificial Sequence
  Synthetic
aggcugcagugauauacuu

SEQ ID NO: 2430 - RNA, 19 nt, Artificial Sequence
  Synthetic
caggcugcagugauauacu

SEQ ID NO: 2431 - RNA, 19 nt, Artificial Sequence
  Synthetic
acaggcugcagugauauac

SEQ ID NO: 2432 - RNA, 19 nt, Artificial Sequence
  Synthetic
uuuaggauucuguguguuu

SEQ ID NO: 2433 - RNA, 19 nt, Artificial Sequence
  Synthetic
auuuaggauucuguguguu

SEQ ID NO: 2434 - RNA, 19 nt, Artificial Sequence
  Synthetic
uauuuaggauucugugugu

SEQ ID NO: 2435 - RNA, 19 nt, Artificial Sequence
  Synthetic
auauuuaggauucugugug

SEQ ID NO: 2436 - RNA, 19 nt, Artificial Sequence
  Synthetic
uauauuuaggauucugugu

SEQ ID NO: 2437 - RNA, 19 nt, Artificial Sequence
  Synthetic
auauauuuaggauucugug

SEQ ID NO: 2438 - RNA, 19 nt, Artificial Sequence
  Synthetic
gauauauuuaggauucugu

SEQ ID NO: 2439 - RNA, 19 nt, Artificial Sequence
  Synthetic
ugauauauuuaggauucug

SEQ ID NO: 2440 - RNA, 19 nt, Artificial Sequence
  Synthetic
gugauauauuuaggauucu

SEQ ID NO: 2441 - RNA, 19 nt, Artificial Sequence
  Synthetic
agugauauauuuaggauuc

SEQ ID NO: 2442 - RNA, 19 nt, Artificial Sequence
  Synthetic
cagugauauauuuaggauu

SEQ ID NO: 2443 - RNA, 19 nt, Artificial Sequence
  Synthetic
gcagugauauauuuaggau

SEQ ID NO: 2444 - RNA, 19 nt, Artificial Sequence
  Synthetic
ugcagugauauauuuagga

SEQ ID NO: 2445 - RNA, 19 nt, Artificial Sequence
  Synthetic
cugcagugauauauuuagg

SEQ ID NO: 2446 - RNA, 19 nt, Artificial Sequence
  Synthetic
gcugcagugauauauuuag

SEQ ID NO: 2447 - RNA, 19 nt, Artificial Sequence
  Synthetic
ggcugcagugauauauuua

SEQ ID NO: 2448 - RNA, 19 nt, Artificial Sequence
  Synthetic
aggcugcagugauauauuu

SEQ ID NO: 2449 - RNA, 19 nt, Artificial Sequence
  Synthetic
caggcugcagugauauauu

SEQ ID NO: 2450 - RNA, 19 nt, Artificial Sequence
  Synthetic
acaggcugcagugauauau

SEQ ID NO: 2451 - RNA, 19 nt, Artificial Sequence
  Synthetic
gagcaauggcgugagaaac

SEQ ID NO: 2452 - RNA, 19 nt, Artificial Sequence
  Synthetic
ugagcaauggcgugagaaa

SEQ ID NO: 2453 - RNA, 19 nt, Artificial Sequence
  Synthetic
cugagcaauggcgugagaa

SEQ ID NO: 2454 - RNA, 19 nt, Artificial Sequence
  Synthetic
ccugagcaauggcgugaga

SEQ ID NO: 2455 - RNA, 19 nt, Artificial Sequence
  Synthetic
uccugagcaauggcgugag

SEQ ID NO: 2456 - RNA, 19 nt, Artificial Sequence
  Synthetic
uuccugagcaauggcguga

SEQ ID NO: 2457 - RNA, 19 nt, Artificial Sequence
  Synthetic
guuccugagcaauggcgug

SEQ ID NO: 2458 - RNA, 19 nt, Artificial Sequence
  Synthetic
uguuccugagcaauggcgu

SEQ ID NO: 2459 - RNA, 19 nt, Artificial Sequence
  Synthetic
auguuccugagcaauggcg

SEQ ID NO: 2460 - RNA, 19 nt, Artificial Sequence
  Synthetic
gauguuccugagcaauggc

SEQ ID NO: 2461 - RNA, 19 nt, Artificial Sequence
  Synthetic
ugauguuccugagcaaugg

SEQ ID NO: 2462 - RNA, 19 nt, Artificial Sequence
  Synthetic
augauguuccugagcaaug

SEQ ID NO: 2463 - RNA, 19 nt, Artificial Sequence
  Synthetic
gaugauguuccugagcaau

SEQ ID NO: 2464 - RNA, 19 nt, Artificial Sequence
  Synthetic
ugaugauguuccugagcaa

SEQ ID NO: 2465 - RNA, 19 nt, Artificial Sequence
  Synthetic
augaugauguuccugagca

SEQ ID NO: 2466 - RNA, 19 nt, Artificial Sequence
  Synthetic
gaugaugauguuccugagc

SEQ ID NO: 2467 - RNA, 19 nt, Artificial Sequence
  Synthetic
ugaugaugauguuccugag

SEQ ID NO: 2468 - RNA, 19 nt, Artificial Sequence
  Synthetic
cugaugaugauguuccuga

SEQ ID NO: 2469 - RNA, 19 nt, Artificial Sequence
  Synthetic
gcugaugaugauguuccug

SEQ ID NO: 2470 - RNA, 19 nt, Artificial Sequence
  Synthetic
uagcaauggcgugagaaac

SEQ ID NO: 2471 - RNA, 19 nt, Artificial Sequence
  Synthetic
uuagcaauggcgugagaaa

SEQ ID NO: 2472 - RNA, 19 nt, Artificial Sequence
  Synthetic
cuuagcaauggcgugagaa

SEQ ID NO: 2473 - RNA, 19 nt, Artificial Sequence
  Synthetic
ccuuagcaauggcgugaga

SEQ ID NO: 2474 - RNA, 19 nt, Artificial Sequence
  Synthetic
uccuuagcaauggcgugag

SEQ ID NO: 2475 - RNA, 19 nt, Artificial Sequence
  Synthetic
uuccuuagcaauggcguga

SEQ ID NO: 2476 - RNA, 19 nt, Artificial Sequence
  Synthetic
guuccuuagcaauggcgug

SEQ ID NO: 2477 - RNA, 19 nt, Artificial Sequence
  Synthetic
uguuccuuagcaauggcgu

SEQ ID NO: 2478 - RNA, 19 nt, Artificial Sequence
  Synthetic
auguuccuuagcaauggcg

SEQ ID NO: 2479 - RNA, 19 nt, Artificial Sequence
  Synthetic
gauguuccuuagcaauggc

SEQ ID NO: 2480 - RNA, 19 nt, Artificial Sequence
  Synthetic
ugauguuccuuagcaaugg

SEQ ID NO: 2481 - RNA, 19 nt, Artificial Sequence
  Synthetic
augauguuccuuagcaaug

SEQ ID NO: 2482 - RNA, 19 nt, Artificial Sequence
  Synthetic
gaugauguuccuuagcaau

SEQ ID NO: 2483 - RNA, 19 nt, Artificial Sequence
  Synthetic
ugaugauguuccuuagcaa

SEQ ID NO: 2484 - RNA, 19 nt, Artificial Sequence
  Synthetic
augaugauguuccuuagca

SEQ ID NO: 2485 - RNA, 19 nt, Artificial Sequence
  Synthetic
gaugaugauguuccuuagc

SEQ ID NO: 2486 - RNA, 19 nt, Artificial Sequence
  Synthetic
ugaugaugauguuccuuag

SEQ ID NO: 2487 - RNA, 19 nt, Artificial Sequence
  Synthetic
cugaugaugauguuccuua

SEQ ID NO: 2488 - RNA, 19 nt, Artificial Sequence
  Synthetic
gcugaugaugauguuccuu

SEQ ID NO: 2489 - RNA, 19 nt, Artificial Sequence
  Synthetic
guugaugcgguagaugaac

SEQ ID NO: 2490 - RNA, 19 nt, Artificial Sequence
  Synthetic
uguugaugcgguagaugaa

SEQ ID NO: 2491 - RNA, 19 nt, Artificial Sequence
  Synthetic
guguugaugcgguagauga

SEQ ID NO: 2492 - RNA, 19 nt, Artificial Sequence
  Synthetic
uguguugaugcgguagaug

SEQ ID NO: 2493 - RNA, 19 nt, Artificial Sequence
  Synthetic
guguguugaugcgguagau

SEQ ID NO: 2494 - RNA, 19 nt, Artificial Sequence
  Synthetic
aguguguugaugcgguaga

SEQ ID NO: 2495 - RNA, 19 nt, Artificial Sequence
  Synthetic
uaguguguugaugcgguag

SEQ ID NO: 2496 - RNA, 19 nt, Artificial Sequence
  Synthetic
cuaguguguugaugcggua

SEQ ID NO: 2497 - RNA, 19 nt, Artificial Sequence
  Synthetic
ccuaguguguugaugcggu

SEQ ID NO: 2498 - RNA, 19 nt, Artificial Sequence
  Synthetic
gccuaguguguugaugcgg

SEQ ID NO: 2499 - RNA, 19 nt, Artificial Sequence
  Synthetic
agccuaguguguugaugcg

SEQ ID NO: 2500 - RNA, 19 nt, Artificial Sequence
  Synthetic
cagccuaguguguugaugc

SEQ ID NO: 2501 - RNA, 19 nt, Artificial Sequence
  Synthetic
ccagccuaguguguugaug

SEQ ID NO: 2502 - RNA, 19 nt, Artificial Sequence
  Synthetic
uccagccuaguguguugau

SEQ ID NO: 2503 - RNA, 19 nt, Artificial Sequence
  Synthetic
guccagccuaguguguuga

SEQ ID NO: 2504 - RNA, 19 nt, Artificial Sequence
  Synthetic
gguccagccuaguguguug

SEQ ID NO: 2505 - RNA, 19 nt, Artificial Sequence
  Synthetic
ugguccagccuaguguguu

SEQ ID NO: 2506 - RNA, 19 nt, Artificial Sequence
  Synthetic
cugguccagccuagugugu

SEQ ID NO: 2507 - RNA, 19 nt, Artificial Sequence
  Synthetic
acugguccagccuagugug

SEQ ID NO: 2508 - RNA, 19 nt, Artificial Sequence
  Synthetic
auugaugcgguagaugaac

SEQ ID NO: 2509 - RNA, 19 nt, Artificial Sequence
  Synthetic
uauugaugcgguagaugaa

SEQ ID NO: 2510 - RNA, 19 nt, Artificial Sequence
  Synthetic
guauugaugcgguagauga

SEQ ID NO: 2511 - RNA, 19 nt, Artificial Sequence
  Synthetic
uguauugaugcgguagaug

SEQ ID NO: 2512 - RNA, 19 nt, Artificial Sequence
  Synthetic
guguauugaugcgguagau

SEQ ID NO: 2513 - RNA, 19 nt, Artificial Sequence
  Synthetic
aguguauugaugcgguaga

SEQ ID NO: 2514 - RNA, 19 nt, Artificial Sequence
  Synthetic
uaguguauugaugcgguag

SEQ ID NO: 2515 - RNA, 19 nt, Artificial Sequence
  Synthetic
cuaguguauugaugcggua

SEQ ID NO: 2516 - RNA, 19 nt, Artificial Sequence
  Synthetic
ccuaguguauugaugcggu

SEQ ID NO: 2517 - RNA, 19 nt, Artificial Sequence
  Synthetic
gccuaguguauugaugcgg

SEQ ID NO: 2518 - RNA, 19 nt, Artificial Sequence
  Synthetic
agccuaguguauugaugcg

SEQ ID NO: 2519 - RNA, 19 nt, Artificial Sequence
  Synthetic
cagccuaguguauugaugc

SEQ ID NO: 2520 - RNA, 19 nt, Artificial Sequence
  Synthetic
ccagccuaguguauugaug

SEQ ID NO: 2521 - RNA, 19 nt, Artificial Sequence
  Synthetic
uccagccuaguguauugau

SEQ ID NO: 2522 - RNA, 19 nt, Artificial Sequence
  Synthetic
guccagccuaguguauuga

SEQ ID NO: 2523 - RNA, 19 nt, Artificial Sequence
  Synthetic
gguccagccuaguguauug

SEQ ID NO: 2524 - RNA, 19 nt, Artificial Sequence
  Synthetic
ugguccagccuaguguauu

SEQ ID NO: 2525 - RNA, 19 nt, Artificial Sequence
  Synthetic
cugguccagccuaguguau

SEQ ID NO: 2526 - RNA, 19 nt, Artificial Sequence
  Synthetic
acugguccagccuagugua

SEQ ID NO: 2527 - RNA, 19 nt, Artificial Sequence
  Synthetic
gcgucaccaggacaccaag

SEQ ID NO: 2528 - RNA, 19 nt, Artificial Sequence
  Synthetic
ugcgucaccaggacaccaa

SEQ ID NO: 2529 - RNA, 19 nt, Artificial Sequence
  Synthetic
cugcgucaccaggacacca

SEQ ID NO: 2530 - RNA, 19 nt, Artificial Sequence
  Synthetic
gcugcgucaccaggacacc

SEQ ID NO: 2531 - RNA, 19 nt, Artificial Sequence
  Synthetic
ggcugcgucaccaggacac

SEQ ID NO: 2532 - RNA, 19 nt, Artificial Sequence
  Synthetic
gggcugcgucaccaggaca

SEQ ID NO: 2533 - RNA, 19 nt, Artificial Sequence
  Synthetic
ggggcugcgucaccaggac

SEQ ID NO: 2534 - RNA, 19 nt, Artificial Sequence
  Synthetic
aggggcugcgucaccagga

SEQ ID NO: 2535 - RNA, 19 nt, Artificial Sequence
  Synthetic
gaggggcugcgucaccagg

SEQ ID NO: 2536 - RNA, 19 nt, Artificial Sequence
  Synthetic
cgaggggcugcgucaccag

SEQ ID NO: 2537 - RNA, 19 nt, Artificial Sequence
  Synthetic
acgaggggcugcgucacca

SEQ ID NO: 2538 - RNA, 19 nt, Artificial Sequence
  Synthetic
cacgaggggcugcgucacc

SEQ ID NO: 2539 - RNA, 19 nt, Artificial Sequence
  Synthetic
ucacgaggggcugcgucac

SEQ ID NO: 2540 - RNA, 19 nt, Artificial Sequence
  Synthetic
aucacgaggggcugcguca

SEQ ID NO: 2541 - RNA, 19 nt, Artificial Sequence
  Synthetic
caucacgaggggcugcguc

SEQ ID NO: 2542 - RNA, 19 nt, Artificial Sequence
  Synthetic
ccaucacgaggggcugcgu

SEQ ID NO: 2543 - RNA, 19 nt, Artificial Sequence
  Synthetic
uccaucacgaggggcugcg

SEQ ID NO: 2544 - RNA, 19 nt, Artificial Sequence
  Synthetic
cuccaucacgaggggcugc

SEQ ID NO: 2545 - RNA, 19 nt, Artificial Sequence
  Synthetic
gcuccaucacgaggggcug

SEQ ID NO: 2546 - RNA, 19 nt, Artificial Sequence
  Synthetic
acgucaccaggacaccaag

SEQ ID NO: 2547 - RNA, 19 nt, Artificial Sequence
  Synthetic
uacgucaccaggacaccaa

SEQ ID NO: 2548 - RNA, 19 nt, Artificial Sequence
  Synthetic
cuacgucaccaggacacca

SEQ ID NO: 2549 - RNA, 19 nt, Artificial Sequence
  Synthetic
gcuacgucaccaggacacc

SEQ ID NO: 2550 - RNA, 19 nt, Artificial Sequence
  Synthetic
ggcuacgucaccaggacac

SEQ ID NO: 2551 - RNA, 19 nt, Artificial Sequence
  Synthetic
gggcuacgucaccaggaca

SEQ ID NO: 2552 - RNA, 19 nt, Artificial Sequence
  Synthetic
ggggcuacgucaccaggac

SEQ ID NO: 2553 - RNA, 19 nt, Artificial Sequence
  Synthetic
aggggcuacgucaccagga

SEQ ID NO: 2554 - RNA, 19 nt, Artificial Sequence
  Synthetic
gaggggcuacgucaccagg

SEQ ID NO: 2555 - RNA, 19 nt, Artificial Sequence
  Synthetic
cgaggggcuacgucaccag

SEQ ID NO: 2556 - RNA, 19 nt, Artificial Sequence
  Synthetic
acgaggggcuacgucacca

SEQ ID NO: 2557 - RNA, 19 nt, Artificial Sequence
  Synthetic
cacgaggggcuacgucacc

SEQ ID NO: 2558 - RNA, 19 nt, Artificial Sequence
  Synthetic
ucacgaggggcuacgucac

SEQ ID NO: 2559 - RNA, 19 nt, Artificial Sequence
  Synthetic
aucacgaggggcuacguca

SEQ ID NO: 2560 - RNA, 19 nt, Artificial Sequence
  Synthetic
caucacgaggggcuacguc

SEQ ID NO: 2561 - RNA, 19 nt, Artificial Sequence
  Synthetic
ccaucacgaggggcuacgu

SEQ ID NO: 2562 - RNA, 19 nt, Artificial Sequence
  Synthetic
uccaucacgaggggcuacg

SEQ ID NO: 2563 - RNA, 19 nt, Artificial Sequence
  Synthetic
cuccaucacgaggggcuac

SEQ ID NO: 2564 - RNA, 19 nt, Artificial Sequence
  Synthetic
gcuccaucacgaggggcua

SEQ ID NO: 2565 - RNA, 19 nt, Artificial Sequence
  Synthetic
ccagugaggugauggccug

SEQ ID NO: 2566 - RNA, 19 nt, Artificial Sequence
  Synthetic
accagugaggugauggccu

SEQ ID NO: 2567 - RNA, 19 nt, Artificial Sequence
  Synthetic
caccagugaggugauggcc

SEQ ID NO: 2568 - RNA, 19 nt, Artificial Sequence
  Synthetic
gcaccagugaggugauggc

SEQ ID NO: 2569 - RNA, 19 nt, Artificial Sequence
  Synthetic
agcaccagugaggugaugg

SEQ ID NO: 2570 - RNA, 19 nt, Artificial Sequence
  Synthetic
gagcaccagugaggugaug

SEQ ID NO: 2571 - RNA, 19 nt, Artificial Sequence
  Synthetic
ugagcaccagugaggugau

SEQ ID NO: 2572 - RNA, 19 nt, Artificial Sequence
  Synthetic
cugagcaccagugagguga

SEQ ID NO: 2573 - RNA, 19 nt, Artificial Sequence
  Synthetic
acugagcaccagugaggug

SEQ ID NO: 2574 - RNA, 19 nt, Artificial Sequence
  Synthetic
cacugagcaccagugaggu

SEQ ID NO: 2575 - RNA, 19 nt, Artificial Sequence
  Synthetic
gcacugagcaccagugagg

SEQ ID NO: 2576 - RNA, 19 nt, Artificial Sequence
  Synthetic
ugcacugagcaccagugag

SEQ ID NO: 2577 - RNA, 19 nt, Artificial Sequence
  Synthetic
uugcacugagcaccaguga

SEQ ID NO: 2578 - RNA, 19 nt, Artificial Sequence
  Synthetic
auugcacugagcaccagug

SEQ ID NO: 2579 - RNA, 19 nt, Artificial Sequence
  Synthetic
cauugcacugagcaccagu

SEQ ID NO: 2580 - RNA, 19 nt, Artificial Sequence
  Synthetic
ucauugcacugagcaccag

SEQ ID NO: 2581 - RNA, 19 nt, Artificial Sequence
  Synthetic
gucauugcacugagcacca

SEQ ID NO: 2582 - RNA, 19 nt, Artificial Sequence
  Synthetic
agucauugcacugagcacc

SEQ ID NO: 2583 - RNA, 19 nt, Artificial Sequence
  Synthetic
cagucauugcacugagcac

SEQ ID NO: 2584 - RNA, 19 nt, Artificial Sequence
  Synthetic
gcagugaggugauggccug

SEQ ID NO: 2585 - RNA, 19 nt, Artificial Sequence
  Synthetic
agcagugaggugauggccu

SEQ ID NO: 2586 - RNA, 19 nt, Artificial Sequence
  Synthetic
cagcagugaggugauggcc

SEQ ID NO: 2587 - RNA, 19 nt, Artificial Sequence
  Synthetic
gcagcagugaggugauggc

SEQ ID NO: 2588 - RNA, 19 nt, Artificial Sequence
  Synthetic
agcagcagugaggugaugg

SEQ ID NO: 2589 - RNA, 19 nt, Artificial Sequence
  Synthetic
gagcagcagugaggugaug

SEQ ID NO: 2590 - RNA, 19 nt, Artificial Sequence
  Synthetic
ugagcagcagugaggugau

SEQ ID NO: 2591 - RNA, 19 nt, Artificial Sequence
  Synthetic
cugagcagcagugagguga

SEQ ID NO: 2592 - RNA, 19 nt, Artificial Sequence
  Synthetic
acugagcagcagugaggug

SEQ ID NO: 2593 - RNA, 19 nt, Artificial Sequence
  Synthetic
cacugagcagcagugaggu

SEQ ID NO: 2594 - RNA, 19 nt, Artificial Sequence
  Synthetic
gcacugagcagcagugagg

SEQ ID NO: 2595 - RNA, 19 nt, Artificial Sequence
  Synthetic
ugcacugagcagcagugag

SEQ ID NO: 2596 - RNA, 19 nt, Artificial Sequence
  Synthetic
uugcacugagcagcaguga

SEQ ID NO: 2597 - RNA, 19 nt, Artificial Sequence
  Synthetic
auugcacugagcagcagug

SEQ ID NO: 2598 - RNA, 19 nt, Artificial Sequence
  Synthetic
cauugcacugagcagcagu

SEQ ID NO: 2599 - RNA, 19 nt, Artificial Sequence
  Synthetic
ucauugcacugagcagcag

SEQ ID NO: 2600 - RNA, 19 nt, Artificial Sequence
  Synthetic
gucauugcacugagcagca

SEQ ID NO: 2601 - RNA, 19 nt, Artificial Sequence
  Synthetic
agucauugcacugagcagc

SEQ ID NO: 2602 - RNA, 19 nt, Artificial Sequence
  Synthetic
cagucauugcacugagcag

SEQ ID NO: 2603 - RNA, 19 nt, Artificial Sequence
  Synthetic
uagcagcagcuucucgugg

SEQ ID NO: 2604 - RNA, 19 nt, Artificial Sequence
  Synthetic
guagcagcagcuucucgug

SEQ ID NO: 2605 - RNA, 19 nt, Artificial Sequence
  Synthetic
uguagcagcagcuucucgu

SEQ ID NO: 2606 - RNA, 19 nt, Artificial Sequence
  Synthetic
cuguagcagcagcuucucg

SEQ ID NO: 2607 - RNA, 19 nt, Artificial Sequence
  Synthetic
ucuguagcagcagcuucuc

SEQ ID NO: 2608 - RNA, 19 nt, Artificial Sequence
  Synthetic
aucuguagcagcagcuucu

SEQ ID NO: 2609 - RNA, 19 nt, Artificial Sequence
  Synthetic
gaucuguagcagcagcuuc

SEQ ID NO: 2610 - RNA, 19 nt, Artificial Sequence
  Synthetic
ugaucuguagcagcagcuu

SEQ ID NO: 2611 - RNA, 19 nt, Artificial Sequence
  Synthetic
uugaucuguagcagcagcu

SEQ ID NO: 2612 - RNA, 19 nt, Artificial Sequence
  Synthetic
guugaucuguagcagcagc

SEQ ID NO: 2613 - RNA, 19 nt, Artificial Sequence
  Synthetic
gguugaucuguagcagcag

SEQ ID NO: 2614 - RNA, 19 nt, Artificial Sequence
  Synthetic
ggguugaucuguagcagca

SEQ ID NO: 2615 - RNA, 19 nt, Artificial Sequence
  Synthetic
gggguugaucuguagcagc

SEQ ID NO: 2616 - RNA, 19 nt, Artificial Sequence
  Synthetic
cgggguugaucuguagcag

SEQ ID NO: 2617 - RNA, 19 nt, Artificial Sequence
  Synthetic
ucgggguugaucuguagca

SEQ ID NO: 2618 - RNA, 19 nt, Artificial Sequence
  Synthetic
cucgggguugaucuguagc

SEQ ID NO: 2619 - RNA, 19 nt, Artificial Sequence
  Synthetic
gcucgggguugaucuguag

SEQ ID NO: 2620 - RNA, 19 nt, Artificial Sequence
  Synthetic
cgcucgggguugaucugua

SEQ ID NO: 2621 - RNA, 19 nt, Artificial Sequence
  Synthetic
ccgcucgggguugaucugu

SEQ ID NO: 2622 - RNA, 19 nt, Artificial Sequence
  Synthetic
cagcagcagcuucucgugg

SEQ ID NO: 2623 - RNA, 19 nt, Artificial Sequence
  Synthetic
gcagcagcagcuucucgug

SEQ ID NO: 2624 - RNA, 19 nt, Artificial Sequence
  Synthetic
ugcagcagcagcuucucgu

SEQ ID NO: 2625 - RNA, 19 nt, Artificial Sequence
  Synthetic
cugcagcagcagcuucucg

SEQ ID NO: 2626 - RNA, 19 nt, Artificial Sequence
  Synthetic
ucugcagcagcagcuucuc

SEQ ID NO: 2627 - RNA, 19 nt, Artificial Sequence
  Synthetic
aucugcagcagcagcuucu

SEQ ID NO: 2628 - RNA, 19 nt, Artificial Sequence
  Synthetic
gaucugcagcagcagcuuc

SEQ ID NO: 2629 - RNA, 19 nt, Artificial Sequence
  Synthetic
ugaucugcagcagcagcuu

SEQ ID NO: 2630 - RNA, 19 nt, Artificial Sequence
  Synthetic
uugaucugcagcagcagcu

SEQ ID NO: 2631 - RNA, 19 nt, Artificial Sequence
  Synthetic
guugaucugcagcagcagc

SEQ ID NO: 2632 - RNA, 19 nt, Artificial Sequence
  Synthetic
gguugaucugcagcagcag

SEQ ID NO: 2633 - RNA, 19 nt, Artificial Sequence
  Synthetic
ggguugaucugcagcagca

SEQ ID NO: 2634 - RNA, 19 nt, Artificial Sequence
  Synthetic
gggguugaucugcagcagc

SEQ ID NO: 2635 - RNA, 19 nt, Artificial Sequence
  Synthetic
cgggguugaucugcagcag

SEQ ID NO: 2636 - RNA, 19 nt, Artificial Sequence
  Synthetic
ucgggguugaucugcagca

SEQ ID NO: 2637 - RNA, 19 nt, Artificial Sequence
  Synthetic
cucgggguugaucugcagc

SEQ ID NO: 2638 - RNA, 19 nt, Artificial Sequence
  Synthetic
gcucgggguugaucugcag

SEQ ID NO: 2639 - RNA, 19 nt, Artificial Sequence
  Synthetic
cgcucgggguugaucugca

SEQ ID NO: 2640 - RNA, 19 nt, Artificial Sequence
  Synthetic
ccgcucgggguugaucugc

SEQ ID NO: 2641 - RNA, 19 nt, Artificial Sequence
  Synthetic
uccuccuccucuuccucgu

SEQ ID NO: 2642 - RNA, 19 nt, Artificial Sequence
  Synthetic
cuccuccuccucuuccucg

SEQ ID NO: 2643 - RNA, 19 nt, Artificial Sequence
  Synthetic
ccuccuccuccucuuccuc

SEQ ID NO: 2644 - RNA, 19 nt, Artificial Sequence
  Synthetic
gccuccuccuccucuuccu

SEQ ID NO: 2645 - RNA, 19 nt, Artificial Sequence
  Synthetic
ggccuccuccuccucuucc

SEQ ID NO: 2646 - RNA, 19 nt, Artificial Sequence
  Synthetic
cggccuccuccuccucuuc

SEQ ID NO: 2647 - RNA, 19 nt, Artificial Sequence
  Synthetic
ucggccuccuccuccucuu

SEQ ID NO: 2648 - RNA, 19 nt, Artificial Sequence
  Synthetic
gucggccuccuccuccucu

SEQ ID NO: 2649 - RNA, 19 nt, Artificial Sequence
  Synthetic
cgucggccuccuccuccuc

SEQ ID NO: 2650 - RNA, 19 nt, Artificial Sequence
  Synthetic
gcgucggccuccuccuccu

SEQ ID NO: 2651 - RNA, 19 nt, Artificial Sequence
  Synthetic
ggcgucggccuccuccucc

SEQ ID NO: 2652 - RNA, 19 nt, Artificial Sequence
  Synthetic
gccuccuccucuuccucgu

SEQ ID NO: 2653 - RNA, 19 nt, Artificial Sequence
  Synthetic
ggccuccuccucuuccucg

SEQ ID NO: 2654 - RNA, 19 nt, Artificial Sequence
  Synthetic
cggccuccuccucuuccuc

SEQ ID NO: 2655 - RNA, 19 nt, Artificial Sequence
  Synthetic
ucggccuccuccucuuccu

SEQ ID NO: 2656 - RNA, 19 nt, Artificial Sequence
  Synthetic
gucggccuccuccucuucc

SEQ ID NO: 2657 - RNA, 19 nt, Artificial Sequence
  Synthetic
cgucggccuccuccucuuc

SEQ ID NO: 2658 - RNA, 19 nt, Artificial Sequence
  Synthetic
gcgucggccuccuccucuu

SEQ ID NO: 2659 - RNA, 19 nt, Artificial Sequence
  Synthetic
ggcgucggccuccuccucu

SEQ ID NO: 2660 - RNA, 19 nt, Artificial Sequence
  Synthetic
cagcucaaacugguugcgc

SEQ ID NO: 2661 - RNA, 19 nt, Artificial Sequence
  Synthetic
ucagcucaaacugguugcg

SEQ ID NO: 2662 - RNA, 19 nt, Artificial Sequence
  Synthetic
aucagcucaaacugguugc

SEQ ID NO: 2663 - RNA, 19 nt, Artificial Sequence
  Synthetic
caucagcucaaacugguug

SEQ ID NO: 2664 - RNA, 19 nt, Artificial Sequence
  Synthetic
acaucagcucaaacugguu

SEQ ID NO: 2665 - RNA, 19 nt, Artificial Sequence
  Synthetic
uacaucagcucaaacuggu

SEQ ID NO: 2666 - RNA, 19 nt, Artificial Sequence
  Synthetic
auacaucagcucaaacugg

SEQ ID NO: 2667 - RNA, 19 nt, Artificial Sequence
  Synthetic
cauacaucagcucaaacug

SEQ ID NO: 2668 - RNA, 19 nt, Artificial Sequence
  Synthetic
acauacaucagcucaaacu

SEQ ID NO: 2669 - RNA, 19 nt, Artificial Sequence
  Synthetic
cacauacaucagcucaaac

SEQ ID NO: 2670 - RNA, 19 nt, Artificial Sequence
  Synthetic
ucacauacaucagcucaaa

SEQ ID NO: 2671 - RNA, 19 nt, Artificial Sequence
  Synthetic
gucacauacaucagcucaa

SEQ ID NO: 2672 - RNA, 19 nt, Artificial Sequence
  Synthetic
cgucacauacaucagcuca

SEQ ID NO: 2673 - RNA, 19 nt, Artificial Sequence
  Synthetic
gcgucacauacaucagcuc

SEQ ID NO: 2674 - RNA, 19 nt, Artificial Sequence
  Synthetic
agcgucacauacaucagcu

SEQ ID NO: 2675 - RNA, 19 nt, Artificial Sequence
  Synthetic
cagcgucacauacaucagc

SEQ ID NO: 2676 - RNA, 19 nt, Artificial Sequence
  Synthetic
ucagcgucacauacaucag

SEQ ID NO: 2677 - RNA, 19 nt, Artificial Sequence
  Synthetic
gucagcgucacauacauca

SEQ ID NO: 2678 - RNA, 19 nt, Artificial Sequence
  Synthetic
ugucagcgucacauacauc

SEQ ID NO: 2679 - RNA, 19 nt, Artificial Sequence
  Synthetic
uagcucaaacugguugcgc

SEQ ID NO: 2680 - RNA, 19 nt, Artificial Sequence
  Synthetic
uuagcucaaacugguugcg

SEQ ID NO: 2681 - RNA, 19 nt, Artificial Sequence
  Synthetic
auuagcucaaacugguugc

SEQ ID NO: 2682 - RNA, 19 nt, Artificial Sequence
  Synthetic
cauuagcucaaacugguug

SEQ ID NO: 2683 - RNA, 19 nt, Artificial Sequence
  Synthetic
acauuagcucaaacugguu

SEQ ID NO: 2684 - RNA, 19 nt, Artificial Sequence
  Synthetic
uacauuagcucaaacuggu

SEQ ID NO: 2685 - RNA, 19 nt, Artificial Sequence
  Synthetic
auacauuagcucaaacugg

SEQ ID NO: 2686 - RNA, 19 nt, Artificial Sequence
  Synthetic
cauacauuagcucaaacug

SEQ ID NO: 2687 - RNA, 19 nt, Artificial Sequence
  Synthetic
acauacauuagcucaaacu

SEQ ID NO: 2688 - RNA, 19 nt, Artificial Sequence
  Synthetic
cacauacauuagcucaaac

SEQ ID NO: 2689 - RNA, 19 nt, Artificial Sequence
  Synthetic
ucacauacauuagcucaaa

SEQ ID NO: 2690 - RNA, 19 nt, Artificial Sequence
  Synthetic
gucacauacauuagcucaa

SEQ ID NO: 2691 - RNA, 19 nt, Artificial Sequence
  Synthetic
cgucacauacauuagcuca

SEQ ID NO: 2692 - RNA, 19 nt, Artificial Sequence
  Synthetic
gcgucacauacauuagcuc

SEQ ID NO: 2693 - RNA, 19 nt, Artificial Sequence
  Synthetic
agcgucacauacauuagcu

SEQ ID NO: 2694 - RNA, 19 nt, Artificial Sequence
  Synthetic
cagcgucacauacauuagc

SEQ ID NO: 2695 - RNA, 19 nt, Artificial Sequence
  Synthetic
ucagcgucacauacauuag

SEQ ID NO: 2696 - RNA, 19 nt, Artificial Sequence
  Synthetic
gucagcgucacauacauua

SEQ ID NO: 2697 - RNA, 19 nt, Artificial Sequence
  Synthetic
ugucagcgucacauacauu

SEQ ID NO: 2698 - RNA, 19 nt, Artificial Sequence
  Synthetic
cgccgugcagggcuccaac

SEQ ID NO: 2699 - RNA, 19 nt, Artificial Sequence
  Synthetic
acgccgugcagggcuccaa

SEQ ID NO: 2700 - RNA, 19 nt, Artificial Sequence
  Synthetic
gacgccgugcagggcucca

SEQ ID NO: 2701 - RNA, 19 nt, Artificial Sequence
  Synthetic
ggacgccgugcagggcucc

SEQ ID NO: 2702 - RNA, 19 nt, Artificial Sequence
  Synthetic
aggacgccgugcagggcuc

SEQ ID NO: 2703 - RNA, 19 nt, Artificial Sequence
  Synthetic
gaggacgccgugcagggcu

SEQ ID NO: 2704 - RNA, 19 nt, Artificial Sequence
  Synthetic
agaggacgccgugcagggc

SEQ ID NO: 2705 - RNA, 19 nt, Artificial Sequence
  Synthetic
uagaggacgccgugcaggg

SEQ ID NO: 2706 - RNA, 19 nt, Artificial Sequence
  Synthetic
auagaggacgccgugcagg

SEQ ID NO: 2707 - RNA, 19 nt, Artificial Sequence
  Synthetic
cauagaggacgccgugcag

SEQ ID NO: 2708 - RNA, 19 nt, Artificial Sequence
  Synthetic
acauagaggacgccgugca

SEQ ID NO: 2709 - RNA, 19 nt, Artificial Sequence
  Synthetic
cacauagaggacgccgugc

SEQ ID NO: 2710 - RNA, 19 nt, Artificial Sequence
  Synthetic
gcacauagaggacgccgug

SEQ ID NO: 2711 - RNA, 19 nt, Artificial Sequence
  Synthetic
agcacauagaggacgccgu

SEQ ID NO: 2712 - RNA, 19 nt, Artificial Sequence
  Synthetic
cagcacauagaggacgccg

SEQ ID NO: 2713 - RNA, 19 nt, Artificial Sequence
  Synthetic
ccagcacauagaggacgcc

SEQ ID NO: 2714 - RNA, 19 nt, Artificial Sequence
  Synthetic
uccagcacauagaggacgc

SEQ ID NO: 2715 - RNA, 19 nt, Artificial Sequence
  Synthetic
cuccagcacauagaggacg

SEQ ID NO: 2716 - RNA, 19 nt, Artificial Sequence
  Synthetic
acuccagcacauagaggac

SEQ ID NO: 2717 - RNA, 19 nt, Artificial Sequence
  Synthetic
ugccgugcagggcuccaac

SEQ ID NO: 2718 - RNA, 19 nt, Artificial Sequence
  Synthetic
augccgugcagggcuccaa

SEQ ID NO: 2719 - RNA, 19 nt, Artificial Sequence
  Synthetic
gaugccgugcagggcucca

SEQ ID NO: 2720 - RNA, 19 nt, Artificial Sequence
  Synthetic
ggaugccgugcagggcucc

SEQ ID NO: 2721 - RNA, 19 nt, Artificial Sequence
  Synthetic
aggaugccgugcagggcuc

SEQ ID NO: 2722 - RNA, 19 nt, Artificial Sequence
  Synthetic
gaggaugccgugcagggcu

SEQ ID NO: 2723 - RNA, 19 nt, Artificial Sequence
  Synthetic
agaggaugccgugcagggc

SEQ ID NO: 2724 - RNA, 19 nt, Artificial Sequence
  Synthetic
uagaggaugccgugcaggg

SEQ ID NO: 2725 - RNA, 19 nt, Artificial Sequence
  Synthetic
auagaggaugccgugcagg

SEQ ID NO: 2726 - RNA, 19 nt, Artificial Sequence
  Synthetic
cauagaggaugccgugcag

SEQ ID NO: 2727 - RNA, 19 nt, Artificial Sequence
  Synthetic
acauagaggaugccgugca

SEQ ID NO: 2728 - RNA, 19 nt, Artificial Sequence
  Synthetic
cacauagaggaugccgugc

SEQ ID NO: 2729 - RNA, 19 nt, Artificial Sequence
  Synthetic
gcacauagaggaugccgug

SEQ ID NO: 2730 - RNA, 19 nt, Artificial Sequence
  Synthetic
agcacauagaggaugccgu

SEQ ID NO: 2731 - RNA, 19 nt, Artificial Sequence
  Synthetic
cagcacauagaggaugccg

SEQ ID NO: 2732 - RNA, 19 nt, Artificial Sequence
  Synthetic
ccagcacauagaggaugcc

SEQ ID NO: 2733 - RNA, 19 nt, Artificial Sequence
  Synthetic
uccagcacauagaggaugc

SEQ ID NO: 2734 - RNA, 19 nt, Artificial Sequence
  Synthetic
cuccagcacauagaggaug

SEQ ID NO: 2735 - RNA, 19 nt, Artificial Sequence
  Synthetic
acuccagcacauagaggau

SEQ ID NO: 2736 - RNA, 19 nt, Artificial Sequence
  Synthetic
cugcaggauuagggucuga

SEQ ID NO: 2737 - RNA, 19 nt, Artificial Sequence
  Synthetic
gcugcaggauuagggucug

SEQ ID NO: 2738 - RNA, 19 nt, Artificial Sequence
  Synthetic
ggcugcaggauuagggucu

SEQ ID NO: 2739 - RNA, 19 nt, Artificial Sequence
  Synthetic
gggcugcaggauuaggguc

SEQ ID NO: 2740 - RNA, 19 nt, Artificial Sequence
  Synthetic
ggggcugcaggauuagggu

SEQ ID NO: 2741 - RNA, 19 nt, Artificial Sequence
  Synthetic
gggggcugcaggauuaggg

SEQ ID NO: 2742 - RNA, 19 nt, Artificial Sequence
  Synthetic
cgggggcugcaggauuagg

SEQ ID NO: 2743 - RNA, 19 nt, Artificial Sequence
  Synthetic
ucgggggcugcaggauuag

SEQ ID NO: 2744 - RNA, 19 nt, Artificial Sequence
  Synthetic
gucgggggcugcaggauua

SEQ ID NO: 2745 - RNA, 19 nt, Artificial Sequence
  Synthetic
ugucgggggcugcaggauu

SEQ ID NO: 2746 - RNA, 19 nt, Artificial Sequence
  Synthetic
cugucgggggcugcaggau

SEQ ID NO: 2747 - RNA, 19 nt, Artificial Sequence
  Synthetic
gcugucgggggcugcagga

SEQ ID NO: 2748 - RNA, 19 nt, Artificial Sequence
  Synthetic
cgcugucgggggcugcagg

SEQ ID NO: 2749 - RNA, 19 nt, Artificial Sequence
  Synthetic
ucgcugucgggggcugcag

SEQ ID NO: 2750 - RNA, 19 nt, Artificial Sequence
  Synthetic
cucgcugucgggggcugca

SEQ ID NO: 2751 - RNA, 19 nt, Artificial Sequence
  Synthetic
acucgcugucgggggcugc

SEQ ID NO: 2752 - RNA, 19 nt, Artificial Sequence
  Synthetic
gacucgcugucgggggcug

SEQ ID NO: 2753 - RNA, 19 nt, Artificial Sequence
  Synthetic
ugacucgcugucgggggcu

SEQ ID NO: 2754 - RNA, 19 nt, Artificial Sequence
  Synthetic
cugacucgcugucgggggc

SEQ ID NO: 2755 - RNA, 19 nt, Artificial Sequence
  Synthetic
augcaggauuagggucuga

SEQ ID NO: 2756 - RNA, 19 nt, Artificial Sequence
  Synthetic
gaugcaggauuagggucug

SEQ ID NO: 2757 - RNA, 19 nt, Artificial Sequence
  Synthetic
ggaugcaggauuagggucu

SEQ ID NO: 2758 - RNA, 19 nt, Artificial Sequence
  Synthetic
gggaugcaggauuaggguc

SEQ ID NO: 2759 - RNA, 19 nt, Artificial Sequence
  Synthetic
ggggaugcaggauuagggu

SEQ ID NO: 2760 - RNA, 19 nt, Artificial Sequence
  Synthetic
gggggaugcaggauuaggg

SEQ ID NO: 2761 - RNA, 19 nt, Artificial Sequence
  Synthetic
cgggggaugcaggauuagg

SEQ ID NO: 2762 - RNA, 19 nt, Artificial Sequence
  Synthetic
ucgggggaugcaggauuag

SEQ ID NO: 2763 - RNA, 19 nt, Artificial Sequence
  Synthetic
gucgggggaugcaggauua

SEQ ID NO: 2764 - RNA, 19 nt, Artificial Sequence
  Synthetic
ugucgggggaugcaggauu

SEQ ID NO: 2765 - RNA, 19 nt, Artificial Sequence
  Synthetic
cugucgggggaugcaggau

SEQ ID NO: 2766 - RNA, 19 nt, Artificial Sequence
  Synthetic
gcugucgggggaugcagga

SEQ ID NO: 2767 - RNA, 19 nt, Artificial Sequence
  Synthetic
cgcugucgggggaugcagg

SEQ ID NO: 2768 - RNA, 19 nt, Artificial Sequence
  Synthetic
ucgcugucgggggaugcag

SEQ ID NO: 2769 - RNA, 19 nt, Artificial Sequence
  Synthetic
cucgcugucgggggaugca

SEQ ID NO: 2770 - RNA, 19 nt, Artificial Sequence
  Synthetic
acucgcugucgggggaugc

SEQ ID NO: 2771 - RNA, 19 nt, Artificial Sequence
  Synthetic
gacucgcugucgggggaug

SEQ ID NO: 2772 - RNA, 19 nt, Artificial Sequence
  Synthetic
ugacucgcugucgggggau

SEQ ID NO: 2773 - RNA, 19 nt, Artificial Sequence
  Synthetic
cugacucgcugucggggga

SEQ ID NO: 2774 - RNA, 19 nt, Artificial Sequence
  Synthetic
auaugggcuuccuggggcu

SEQ ID NO: 2775 - RNA, 19 nt, Artificial Sequence
  Synthetic
gauaugggcuuccuggggc

SEQ ID NO: 2776 - RNA, 19 nt, Artificial Sequence
  Synthetic
ugauaugggcuuccugggg

SEQ ID NO: 2777 - RNA, 19 nt, Artificial Sequence
  Synthetic
gugauaugggcuuccuggg

SEQ ID NO: 2778 - RNA, 19 nt, Artificial Sequence
  Synthetic
ggugauaugggcuuccugg

SEQ ID NO: 2779 - RNA, 19 nt, Artificial Sequence
  Synthetic
cggugauaugggcuuccug

SEQ ID NO: 2780 - RNA, 19 nt, Artificial Sequence
  Synthetic
ccggugauaugggcuuccu

SEQ ID NO: 2781 - RNA, 19 nt, Artificial Sequence
  Synthetic
gccggugauaugggcuucc

SEQ ID NO: 2782 - RNA, 19 nt, Artificial Sequence
  Synthetic
agccggugauaugggcuuc

SEQ ID NO: 2783 - RNA, 19 nt, Artificial Sequence
  Synthetic
cagccggugauaugggcuu

SEQ ID NO: 2784 - RNA, 19 nt, Artificial Sequence
  Synthetic
gcagccggugauaugggcu

SEQ ID NO: 2785 - RNA, 19 nt, Artificial Sequence
  Synthetic
agcagccggugauaugggc

SEQ ID NO: 2786 - RNA, 19 nt, Artificial Sequence
  Synthetic
cagcagccggugauauggg

SEQ ID NO: 2787 - RNA, 19 nt, Artificial Sequence
  Synthetic
ucagcagccggugauaugg

SEQ ID NO: 2788 - RNA, 19 nt, Artificial Sequence
  Synthetic
gucagcagccggugauaug

SEQ ID NO: 2789 - RNA, 19 nt, Artificial Sequence
  Synthetic
agucagcagccggugauau

SEQ ID NO: 2790 - RNA, 19 nt, Artificial Sequence
  Synthetic
aagucagcagccggugaua

SEQ ID NO: 2791 - RNA, 19 nt, Artificial Sequence
  Synthetic
caagucagcagccggugau

SEQ ID NO: 2792 - RNA, 19 nt, Artificial Sequence
  Synthetic
acaagucagcagccgguga

SEQ ID NO: 2793 - RNA, 19 nt, Artificial Sequence
  Synthetic
guaugggcuuccuggggcu

SEQ ID NO: 2794 - RNA, 19 nt, Artificial Sequence
  Synthetic
gguaugggcuuccuggggc

SEQ ID NO: 2795 - RNA, 19 nt, Artificial Sequence
  Synthetic
ugguaugggcuuccugggg

SEQ ID NO: 2796 - RNA, 19 nt, Artificial Sequence
  Synthetic
gugguaugggcuuccuggg

SEQ ID NO: 2797 - RNA, 19 nt, Artificial Sequence
  Synthetic
ggugguaugggcuuccugg

SEQ ID NO: 2798 - RNA, 19 nt, Artificial Sequence
  Synthetic
cggugguaugggcuuccug

SEQ ID NO: 2799 - RNA, 19 nt, Artificial Sequence
  Synthetic
ccggugguaugggcuuccu

SEQ ID NO: 2800 - RNA, 19 nt, Artificial Sequence
  Synthetic
gccggugguaugggcuucc

SEQ ID NO: 2801 - RNA, 19 nt, Artificial Sequence
  Synthetic
agccggugguaugggcuuc

SEQ ID NO: 2802 - RNA, 19 nt, Artificial Sequence
  Synthetic
cagccggugguaugggcuu

SEQ ID NO: 2803 - RNA, 19 nt, Artificial Sequence
  Synthetic
gcagccggugguaugggcu

SEQ ID NO: 2804 - RNA, 19 nt, Artificial Sequence
  Synthetic
agcagccggugguaugggc

SEQ ID NO: 2805 - RNA, 19 nt, Artificial Sequence
  Synthetic
cagcagccggugguauggg

SEQ ID NO: 2806 - RNA, 19 nt, Artificial Sequence
  Synthetic
ucagcagccggugguaugg

SEQ ID NO: 2807 - RNA, 19 nt, Artificial Sequence
  Synthetic
gucagcagccggugguaug

SEQ ID NO: 2808 - RNA, 19 nt, Artificial Sequence
  Synthetic
agucagcagccggugguau

SEQ ID NO: 2809 - RNA, 19 nt, Artificial Sequence
  Synthetic
aagucagcagccgguggua

SEQ ID NO: 2810 - RNA, 19 nt, Artificial Sequence
  Synthetic
caagucagcagccgguggu

SEQ ID NO: 2811 - RNA, 19 nt, Artificial Sequence
  Synthetic
acaagucagcagccggugg

SEQ ID NO: 2812 - RNA, 19 nt, Artificial Sequence
  Synthetic
acagacuuccaaaggcucc

SEQ ID NO: 2813 - RNA, 19 nt, Artificial Sequence
  Synthetic
cacagacuuccaaaggcuc

SEQ ID NO: 2814 - RNA, 19 nt, Artificial Sequence
  Synthetic
gcacagacuuccaaaggcu

SEQ ID NO: 2815 - RNA, 19 nt, Artificial Sequence
  Synthetic
ggcacagacuuccaaaggc

SEQ ID NO: 2816 - RNA, 19 nt, Artificial Sequence
  Synthetic
gggcacagacuuccaaagg

SEQ ID NO: 2817 - RNA, 19 nt, Artificial Sequence
  Synthetic
agggcacagacuuccaaag

SEQ ID NO: 2818 - RNA, 19 nt, Artificial Sequence
  Synthetic
aagggcacagacuuccaaa

SEQ ID NO: 2819 - RNA, 19 nt, Artificial Sequence
  Synthetic
caagggcacagacuuccaa

SEQ ID NO: 2820 - RNA, 19 nt, Artificial Sequence
  Synthetic
acaagggcacagacuucca

SEQ ID NO: 2821 - RNA, 19 nt, Artificial Sequence
  Synthetic
cacaagggcacagacuucc

SEQ ID NO: 2822 - RNA, 19 nt, Artificial Sequence
  Synthetic
gcacaagggcacagacuuc

SEQ ID NO: 2823 - RNA, 19 nt, Artificial Sequence
  Synthetic
ggcacaagggcacagacuu

SEQ ID NO: 2824 - RNA, 19 nt, Artificial Sequence
  Synthetic
gggcacaagggcacagacu

SEQ ID NO: 2825 - RNA, 19 nt, Artificial Sequence
  Synthetic
agggcacaagggcacagac

SEQ ID NO: 2826 - RNA, 19 nt, Artificial Sequence
  Synthetic
cagggcacaagggcacaga

SEQ ID NO: 2827 - RNA, 19 nt, Artificial Sequence
  Synthetic
gcagggcacaagggcacag

SEQ ID NO: 2828 - RNA, 19 nt, Artificial Sequence
  Synthetic
ggcagggcacaagggcaca

SEQ ID NO: 2829 - RNA, 19 nt, Artificial Sequence
  Synthetic
aggcagggcacaagggcac

SEQ ID NO: 2830 - RNA, 19 nt, Artificial Sequence
  Synthetic
gaggcagggcacaagggca

SEQ ID NO: 2831 - RNA, 19 nt, Artificial Sequence
  Synthetic
gcagacuuccaaaggcucc

SEQ ID NO: 2832 - RNA, 19 nt, Artificial Sequence
  Synthetic
cgcagacuuccaaaggcuc

SEQ ID NO: 2833 - RNA, 19 nt, Artificial Sequence
  Synthetic
gcgcagacuuccaaaggcu

SEQ ID NO: 2834 - RNA, 19 nt, Artificial Sequence
  Synthetic
ggcgcagacuuccaaaggc

SEQ ID NO: 2835 - RNA, 19 nt, Artificial Sequence
  Synthetic
gggcgcagacuuccaaagg

SEQ ID NO: 2836 - RNA, 19 nt, Artificial Sequence
  Synthetic
agggcgcagacuuccaaag

SEQ ID NO: 2837 - RNA, 19 nt, Artificial Sequence
  Synthetic
aagggcgcagacuuccaaa

SEQ ID NO: 2838 - RNA, 19 nt, Artificial Sequence
  Synthetic
caagggcgcagacuuccaa

SEQ ID NO: 2839 - RNA, 19 nt, Artificial Sequence
  Synthetic
acaagggcgcagacuucca

SEQ ID NO: 2840 - RNA, 19 nt, Artificial Sequence
  Synthetic
cacaagggcgcagacuucc

SEQ ID NO: 2841 - RNA, 19 nt, Artificial Sequence
  Synthetic
gcacaagggcgcagacuuc

SEQ ID NO: 2842 - RNA, 19 nt, Artificial Sequence
  Synthetic
ggcacaagggcgcagacuu

SEQ ID NO: 2843 - RNA, 19 nt, Artificial Sequence
  Synthetic
gggcacaagggcgcagacu

SEQ ID NO: 2844 - RNA, 19 nt, Artificial Sequence
  Synthetic
agggcacaagggcgcagac

SEQ ID NO: 2845 - RNA, 19 nt, Artificial Sequence
  Synthetic
cagggcacaagggcgcaga

SEQ ID NO: 2846 - RNA, 19 nt, Artificial Sequence
  Synthetic
gcagggcacaagggcgcag

SEQ ID NO: 2847 - RNA, 19 nt, Artificial Sequence
  Synthetic
ggcagggcacaagggcgca

SEQ ID NO: 2848 - RNA, 19 nt, Artificial Sequence
  Synthetic
aggcagggcacaagggcgc

SEQ ID NO: 2849 - RNA, 19 nt, Artificial Sequence
  Synthetic
gaggcagggcacaagggcg

SEQ ID NO: 2850 - RNA, 19 nt, Artificial Sequence
  Synthetic
caaccuggcaacaaccagc

SEQ ID NO: 2851 - RNA, 19 nt, Artificial Sequence
  Synthetic
gcaaccuggcaacaaccag

SEQ ID NO: 2852 - RNA, 19 nt, Artificial Sequence
  Synthetic
ugcaaccuggcaacaacca

SEQ ID NO: 2853 - RNA, 19 nt, Artificial Sequence
  Synthetic
cugcaaccuggcaacaacc

SEQ ID NO: 2854 - RNA, 19 nt, Artificial Sequence
  Synthetic
gcugcaaccuggcaacaac

SEQ ID NO: 2855 - RNA, 19 nt, Artificial Sequence
  Synthetic
agcugcaaccuggcaacaa

SEQ ID NO: 2856 - RNA, 19 nt, Artificial Sequence
  Synthetic
cagcugcaaccuggcaaca

SEQ ID NO: 2857 - RNA, 19 nt, Artificial Sequence
  Synthetic
gcagcugcaaccuggcaac

SEQ ID NO: 2858 - RNA, 19 nt, Artificial Sequence
  Synthetic
agcagcugcaaccuggcaa

SEQ ID NO: 2859 - RNA, 19 nt, Artificial Sequence
  Synthetic
gagcagcugcaaccuggca

SEQ ID NO: 2860 - RNA, 19 nt, Artificial Sequence
  Synthetic
agagcagcugcaaccuggc

SEQ ID NO: 2861 - RNA, 19 nt, Artificial Sequence
  Synthetic
aagagcagcugcaaccugg

SEQ ID NO: 2862 - RNA, 19 nt, Artificial Sequence
  Synthetic
caagagcagcugcaaccug

SEQ ID NO: 2863 - RNA, 19 nt, Artificial Sequence
  Synthetic
gcaagagcagcugcaaccu

SEQ ID NO: 2864 - RNA, 19 nt, Artificial Sequence
  Synthetic
ugcaagagcagcugcaacc

SEQ ID NO: 2865 - RNA, 19 nt, Artificial Sequence
  Synthetic
augcaagagcagcugcaac

SEQ ID NO: 2866 - RNA, 19 nt, Artificial Sequence
  Synthetic
gaugcaagagcagcugcaa

SEQ ID NO: 2867 - RNA, 19 nt, Artificial Sequence
  Synthetic
agaugcaagagcagcugca

SEQ ID NO: 2868 - RNA, 19 nt, Artificial Sequence
  Synthetic
cagaugcaagagcagcugc

SEQ ID NO: 2869 - RNA, 19 nt, Artificial Sequence
  Synthetic
uaaccuggcaacaaccagc

SEQ ID NO: 2870 - RNA, 19 nt, Artificial Sequence
  Synthetic
guaaccuggcaacaaccag

SEQ ID NO: 2871 - RNA, 19 nt, Artificial Sequence
  Synthetic
uguaaccuggcaacaacca

SEQ ID NO: 2872 - RNA, 19 nt, Artificial Sequence
  Synthetic
cuguaaccuggcaacaacc

SEQ ID NO: 2873 - RNA, 19 nt, Artificial Sequence
  Synthetic
gcuguaaccuggcaacaac

SEQ ID NO: 2874 - RNA, 19 nt, Artificial Sequence
  Synthetic
agcuguaaccuggcaacaa

SEQ ID NO: 2875 - RNA, 19 nt, Artificial Sequence
  Synthetic
cagcuguaaccuggcaaca

SEQ ID NO: 2876 - RNA, 19 nt, Artificial Sequence
  Synthetic
gcagcuguaaccuggcaac

SEQ ID NO: 2877 - RNA, 19 nt, Artificial Sequence
  Synthetic
agcagcuguaaccuggcaa

SEQ ID NO: 2878 - RNA, 19 nt, Artificial Sequence
  Synthetic
gagcagcuguaaccuggca

SEQ ID NO: 2879 - RNA, 19 nt, Artificial Sequence
  Synthetic
agagcagcuguaaccuggc

SEQ ID NO: 2880 - RNA, 19 nt, Artificial Sequence
  Synthetic
aagagcagcuguaaccugg

SEQ ID NO: 2881 - RNA, 19 nt, Artificial Sequence
  Synthetic
caagagcagcuguaaccug

SEQ ID NO: 2882 - RNA, 19 nt, Artificial Sequence
  Synthetic
gcaagagcagcuguaaccu

SEQ ID NO: 2883 - RNA, 19 nt, Artificial Sequence
  Synthetic
ugcaagagcagcuguaacc

SEQ ID NO: 2884 - RNA, 19 nt, Artificial Sequence
  Synthetic
augcaagagcagcuguaac

SEQ ID NO: 2885 - RNA, 19 nt, Artificial Sequence
  Synthetic
gaugcaagagcagcuguaa

SEQ ID NO: 2886 - RNA, 19 nt, Artificial Sequence
  Synthetic
agaugcaagagcagcugua

SEQ ID NO: 2887 - RNA, 19 nt, Artificial Sequence
  Synthetic
cagaugcaagagcagcugu

SEQ ID NO: 2888 - RNA, 19 nt, Artificial Sequence
  Synthetic
gccagccugcaggagggag

SEQ ID NO: 2889 - RNA, 19 nt, Artificial Sequence
  Synthetic
agccagccugcaggaggga

SEQ ID NO: 2890 - RNA, 19 nt, Artificial Sequence
  Synthetic
cagccagccugcaggaggg

SEQ ID NO: 2891 - RNA, 19 nt, Artificial Sequence
  Synthetic
acagccagccugcaggagg

SEQ ID NO: 2892 - RNA, 19 nt, Artificial Sequence
  Synthetic
aacagccagccugcaggag

SEQ ID NO: 2893 - RNA, 19 nt, Artificial Sequence
  Synthetic
caacagccagccugcagga

SEQ ID NO: 2894 - RNA, 19 nt, Artificial Sequence
  Synthetic
ccaacagccagccugcagg

SEQ ID NO: 2895 - RNA, 19 nt, Artificial Sequence
  Synthetic
gccaacagccagccugcag

SEQ ID NO: 2896 - RNA, 19 nt, Artificial Sequence
  Synthetic
ggccaacagccagccugca

SEQ ID NO: 2897 - RNA, 19 nt, Artificial Sequence
  Synthetic
gggccaacagccagccugc

SEQ ID NO: 2898 - RNA, 19 nt, Artificial Sequence
  Synthetic
ggggccaacagccagccug

SEQ ID NO: 2899 - RNA, 19 nt, Artificial Sequence
  Synthetic
aggggccaacagccagccu

SEQ ID NO: 2900 - RNA, 19 nt, Artificial Sequence
  Synthetic
gaggggccaacagccagcc

SEQ ID NO: 2901 - RNA, 19 nt, Artificial Sequence
  Synthetic
agaggggccaacagccagc

SEQ ID NO: 2902 - RNA, 19 nt, Artificial Sequence
  Synthetic
cagaggggccaacagccag

SEQ ID NO: 2903 - RNA, 19 nt, Artificial Sequence
  Synthetic
gcagaggggccaacagcca

SEQ ID NO: 2904 - RNA, 19 nt, Artificial Sequence
  Synthetic
agcagaggggccaacagcc

SEQ ID NO: 2905 - RNA, 19 nt, Artificial Sequence
  Synthetic
cagcagaggggccaacagc

SEQ ID NO: 2906 - RNA, 19 nt, Artificial Sequence
  Synthetic
acagcagaggggccaacag

SEQ ID NO: 2907 - RNA, 19 nt, Artificial Sequence
  Synthetic
cccagccugcaggagggag

SEQ ID NO: 2908 - RNA, 19 nt, Artificial Sequence
  Synthetic
acccagccugcaggaggga

SEQ ID NO: 2909 - RNA, 19 nt, Artificial Sequence
  Synthetic
cacccagccugcaggaggg

SEQ ID NO: 2910 - RNA, 19 nt, Artificial Sequence
  Synthetic
acacccagccugcaggagg

SEQ ID NO: 2911 - RNA, 19 nt, Artificial Sequence
  Synthetic
aacacccagccugcaggag

SEQ ID NO: 2912 - RNA, 19 nt, Artificial Sequence
  Synthetic
caacacccagccugcagga

SEQ ID NO: 2913 - RNA, 19 nt, Artificial Sequence
  Synthetic
ccaacacccagccugcagg

SEQ ID NO: 2914 - RNA, 19 nt, Artificial Sequence
  Synthetic
gccaacacccagccugcag

SEQ ID NO: 2915 - RNA, 19 nt, Artificial Sequence
  Synthetic
ggccaacacccagccugca

SEQ ID NO: 2916 - RNA, 19 nt, Artificial Sequence
  Synthetic
gggccaacacccagccugc

SEQ ID NO: 2917 - RNA, 19 nt, Artificial Sequence
  Synthetic
ggggccaacacccagccug

SEQ ID NO: 2918 - RNA, 19 nt, Artificial Sequence
  Synthetic
aggggccaacacccagccu

SEQ ID NO: 2919 - RNA, 19 nt, Artificial Sequence
  Synthetic
gacagcagaggggccaaca

SEQ ID NO: 2920 - RNA, 19 nt, Artificial Sequence
  Synthetic
ggacagcagaggggccaac

SEQ ID NO: 2921 - RNA, 19 nt, Artificial Sequence
  Synthetic
aggacagcagaggggccaa

SEQ ID NO: 2922 - RNA, 19 nt, Artificial Sequence
  Synthetic
caggacagcagaggggcca

SEQ ID NO: 2923 - RNA, 19 nt, Artificial Sequence
  Synthetic
gcaggacagcagaggggcc

SEQ ID NO: 2924 - RNA, 19 nt, Artificial Sequence
  Synthetic
ugcaggacagcagaggggc

SEQ ID NO: 2925 - RNA, 19 nt, Artificial Sequence
  Synthetic
cugcaggacagcagagggg

SEQ ID NO: 2926 - RNA, 19 nt, Artificial Sequence
  Synthetic
acugcaggacagcagaggg

SEQ ID NO: 2927 - RNA, 19 nt, Artificial Sequence
  Synthetic
uacugcaggacagcagagg

SEQ ID NO: 2928 - RNA, 19 nt, Artificial Sequence
  Synthetic
cuacugcaggacagcagag

SEQ ID NO: 2929 - RNA, 19 nt, Artificial Sequence
  Synthetic
ucuacugcaggacagcaga

SEQ ID NO: 2930 - RNA, 19 nt, Artificial Sequence
  Synthetic
uucuacugcaggacagcag

SEQ ID NO: 2931 - RNA, 19 nt, Artificial Sequence
  Synthetic
caggggccaacagccagcc

SEQ ID NO: 2932 - RNA, 19 nt, Artificial Sequence
  Synthetic
acaggggccaacagccagc

SEQ ID NO: 2933 - RNA, 19 nt, Artificial Sequence
  Synthetic
cacaggggccaacagccag

SEQ ID NO: 2934 - RNA, 19 nt, Artificial Sequence
  Synthetic
gcacaggggccaacagcca

SEQ ID NO: 2935 - RNA, 19 nt, Artificial Sequence
  Synthetic
agcacaggggccaacagcc

SEQ ID NO: 2936 - RNA, 19 nt, Artificial Sequence
  Synthetic
cagcacaggggccaacagc

SEQ ID NO: 2937 - RNA, 19 nt, Artificial Sequence
  Synthetic
acagcacaggggccaacag

SEQ ID NO: 2938 - RNA, 19 nt, Artificial Sequence
  Synthetic
gacagcacaggggccaaca

SEQ ID NO: 2939 - RNA, 19 nt, Artificial Sequence
  Synthetic
ggacagcacaggggccaac

SEQ ID NO: 2940 - RNA, 19 nt, Artificial Sequence
  Synthetic
aggacagcacaggggccaa

SEQ ID NO: 2941 - RNA, 19 nt, Artificial Sequence
  Synthetic
caggacagcacaggggcca

SEQ ID NO: 2942 - RNA, 19 nt, Artificial Sequence
  Synthetic
gcaggacagcacaggggcc

SEQ ID NO: 2943 - RNA, 19 nt, Artificial Sequence
  Synthetic
ugcaggacagcacaggggc

SEQ ID NO: 2944 - RNA, 19 nt, Artificial Sequence
  Synthetic
cugcaggacagcacagggg

SEQ ID NO: 2945 - RNA, 19 nt, Artificial Sequence
  Synthetic
acugcaggacagcacaggg

SEQ ID NO: 2946 - RNA, 19 nt, Artificial Sequence
  Synthetic
uacugcaggacagcacagg

SEQ ID NO: 2947 - RNA, 19 nt, Artificial Sequence
  Synthetic
cuacugcaggacagcacag

SEQ ID NO: 2948 - RNA, 19 nt, Artificial Sequence
  Synthetic
ucuacugcaggacagcaca

SEQ ID NO: 2949 - RNA, 19 nt, Artificial Sequence
  Synthetic
uucuacugcaggacagcac

SEQ ID NO: 2950 - RNA, 19 nt, Artificial Sequence
  Synthetic
ggccauggcaucugugcau

SEQ ID NO: 2951 - RNA, 19 nt, Artificial Sequence
  Synthetic
aggccauggcaucugugca

SEQ ID NO: 2952 - RNA, 19 nt, Artificial Sequence
  Synthetic
caggccauggcaucugugc

SEQ ID NO: 2953 - RNA, 19 nt, Artificial Sequence
  Synthetic
acaggccauggcaucugug

SEQ ID NO: 2954 - RNA, 19 nt, Artificial Sequence
  Synthetic
cacaggccauggcaucugu

SEQ ID NO: 2955 - RNA, 19 nt, Artificial Sequence
  Synthetic
gcacaggccauggcaucug

SEQ ID NO: 2956 - RNA, 19 nt, Artificial Sequence
  Synthetic
agcacaggccauggcaucu

SEQ ID NO: 2957 - RNA, 19 nt, Artificial Sequence
  Synthetic
cagcacaggccauggcauc

SEQ ID NO: 2958 - RNA, 19 nt, Artificial Sequence
  Synthetic
ccagcacaggccauggcau

SEQ ID NO: 2959 - RNA, 19 nt, Artificial Sequence
  Synthetic
cccagcacaggccauggca

SEQ ID NO: 2960 - RNA, 19 nt, Artificial Sequence
  Synthetic
gcccagcacaggccauggc

SEQ ID NO: 2961 - RNA, 19 nt, Artificial Sequence
  Synthetic
ggcccagcacaggccaugg

SEQ ID NO: 2962 - RNA, 19 nt, Artificial Sequence
  Synthetic
uggcccagcacaggccaug

SEQ ID NO: 2963 - RNA, 19 nt, Artificial Sequence
  Synthetic
cuggcccagcacaggccau

SEQ ID NO: 2964 - RNA, 19 nt, Artificial Sequence
  Synthetic
acuggcccagcacaggcca

SEQ ID NO: 2965 - RNA, 19 nt, Artificial Sequence
  Synthetic
cacuggcccagcacaggcc

SEQ ID NO: 2966 - RNA, 19 nt, Artificial Sequence
  Synthetic
ccacuggcccagcacaggc

SEQ ID NO: 2967 - RNA, 19 nt, Artificial Sequence
  Synthetic
gccacuggcccagcacagg

SEQ ID NO: 2968 - RNA, 19 nt, Artificial Sequence
  Synthetic
agccacuggcccagcacag

SEQ ID NO: 2969 - RNA, 19 nt, Artificial Sequence
  Synthetic
ugccauggcaucugugcau

SEQ ID NO: 2970 - RNA, 19 nt, Artificial Sequence
  Synthetic
augccauggcaucugugca

SEQ ID NO: 2971 - RNA, 19 nt, Artificial Sequence
  Synthetic
caugccauggcaucugugc

SEQ ID NO: 2972 - RNA, 19 nt, Artificial Sequence
  Synthetic
acaugccauggcaucugug

SEQ ID NO: 2973 - RNA, 19 nt, Artificial Sequence
  Synthetic
cacaugccauggcaucugu

SEQ ID NO: 2974 - RNA, 19 nt, Artificial Sequence
  Synthetic
gcacaugccauggcaucug

SEQ ID NO: 2975 - RNA, 19 nt, Artificial Sequence
  Synthetic
agcacaugccauggcaucu

SEQ ID NO: 2976 - RNA, 19 nt, Artificial Sequence
  Synthetic
cagcacaugccauggcauc

SEQ ID NO: 2977 - RNA, 19 nt, Artificial Sequence
  Synthetic
ccagcacaugccauggcau

SEQ ID NO: 2978 - RNA, 19 nt, Artificial Sequence
  Synthetic
cccagcacaugccauggca

SEQ ID NO: 2979 - RNA, 19 nt, Artificial Sequence
  Synthetic
gcccagcacaugccauggc

SEQ ID NO: 2980 - RNA, 19 nt, Artificial Sequence
  Synthetic
ggcccagcacaugccaugg

SEQ ID NO: 2981 - RNA, 19 nt, Artificial Sequence
  Synthetic
uggcccagcacaugccaug

SEQ ID NO: 2982 - RNA, 19 nt, Artificial Sequence
  Synthetic
cuggcccagcacaugccau

SEQ ID NO: 2983 - RNA, 19 nt, Artificial Sequence
  Synthetic
acuggcccagcacaugcca

SEQ ID NO: 2984 - RNA, 19 nt, Artificial Sequence
  Synthetic
cacuggcccagcacaugcc

SEQ ID NO: 2985 - RNA, 19 nt, Artificial Sequence
  Synthetic
ccacuggcccagcacaugc

SEQ ID NO: 2986 - RNA, 19 nt, Artificial Sequence
  Synthetic
gccacuggcccagcacaug

SEQ ID NO: 2987 - RNA, 19 nt, Artificial Sequence
  Synthetic
agccacuggcccagcacau

SEQ ID NO: 2988 - RNA, 19 nt, Artificial Sequence
  Synthetic
gggugucuagcacccccag

SEQ ID NO: 2989 - RNA, 19 nt, Artificial Sequence
  Synthetic
cgggugucuagcaccccca

SEQ ID NO: 2990 - RNA, 19 nt, Artificial Sequence
  Synthetic
ccgggugucuagcaccccc

SEQ ID NO: 2991 - RNA, 19 nt, Artificial Sequence
  Synthetic
gccgggugucuagcacccc

SEQ ID NO: 2992 - RNA, 19 nt, Artificial Sequence
  Synthetic
ugccgggugucuagcaccc

SEQ ID NO: 2993 - RNA, 19 nt, Artificial Sequence
  Synthetic
gugccgggugucuagcacc

SEQ ID NO: 2994 - RNA, 19 nt, Artificial Sequence
  Synthetic
ggugccgggugucuagcac

SEQ ID NO: 2995 - RNA, 19 nt, Artificial Sequence
  Synthetic
uggugccgggugucuagca

SEQ ID NO: 2996 - RNA, 19 nt, Artificial Sequence
  Synthetic
auggugccgggugucuagc

SEQ ID NO: 2997 - RNA, 19 nt, Artificial Sequence
  Synthetic
aauggugccgggugucuag

SEQ ID NO: 2998 - RNA, 19 nt, Artificial Sequence
  Synthetic
gaauggugccgggugucua

SEQ ID NO: 2999 - RNA, 19 nt, Artificial Sequence
  Synthetic
agaauggugccgggugucu

SEQ ID NO: 3000 - RNA, 19 nt, Artificial Sequence
  Synthetic
gagaauggugccggguguc

SEQ ID NO: 3001 - RNA, 19 nt, Artificial Sequence
  Synthetic
ggagaauggugccgggugu

SEQ ID NO: 3002 - RNA, 19 nt, Artificial Sequence
  Synthetic
gggagaauggugccgggug

SEQ ID NO: 3003 - RNA, 19 nt, Artificial Sequence
  Synthetic
agggagaauggugccgggu

SEQ ID NO: 3004 - RNA, 19 nt, Artificial Sequence
  Synthetic
aagggagaauggugccggg

SEQ ID NO: 3005 - RNA, 19 nt, Artificial Sequence
  Synthetic
gaagggagaauggugccgg

SEQ ID NO: 3006 - RNA, 19 nt, Artificial Sequence
  Synthetic
agaagggagaauggugccg

SEQ ID NO: 3007 - RNA, 19 nt, Artificial Sequence
  Synthetic
aggugucuagcacccccag

SEQ ID NO: 3008 - RNA, 19 nt, Artificial Sequence
  Synthetic
caggugucuagcaccccca

SEQ ID NO: 3009 - RNA, 19 nt, Artificial Sequence
  Synthetic
ccaggugucuagcaccccc

SEQ ID NO: 3010 - RNA, 19 nt, Artificial Sequence
  Synthetic
gccaggugucuagcacccc

SEQ ID NO: 3011 - RNA, 19 nt, Artificial Sequence
  Synthetic
ugccaggugucuagcaccc

SEQ ID NO: 3012 - RNA, 19 nt, Artificial Sequence
  Synthetic
gugccaggugucuagcacc

SEQ ID NO: 3013 - RNA, 19 nt, Artificial Sequence
  Synthetic
ggugccaggugucuagcac

SEQ ID NO: 3014 - RNA, 19 nt, Artificial Sequence
  Synthetic
uggugccaggugucuagca

SEQ ID NO: 3015 - RNA, 19 nt, Artificial Sequence
  Synthetic
auggugccaggugucuagc

SEQ ID NO: 3016 - RNA, 19 nt, Artificial Sequence
  Synthetic
aauggugccaggugucuag

SEQ ID NO: 3017 - RNA, 19 nt, Artificial Sequence
  Synthetic
gaauggugccaggugucua

SEQ ID NO: 3018 - RNA, 19 nt, Artificial Sequence
  Synthetic
agaauggugccaggugucu

SEQ ID NO: 3019 - RNA, 19 nt, Artificial Sequence
  Synthetic
gagaauggugccagguguc

SEQ ID NO: 3020 - RNA, 19 nt, Artificial Sequence
  Synthetic
ggagaauggugccaggugu

SEQ ID NO: 3021 - RNA, 19 nt, Artificial Sequence
  Synthetic
gggagaauggugccaggug

SEQ ID NO: 3022 - RNA, 19 nt, Artificial Sequence
  Synthetic
agggagaauggugccaggu

SEQ ID NO: 3023 - RNA, 19 nt, Artificial Sequence
  Synthetic
aagggagaauggugccagg

SEQ ID NO: 3024 - RNA, 19 nt, Artificial Sequence
  Synthetic
gaagggagaauggugccag

SEQ ID NO: 3025 - RNA, 19 nt, Artificial Sequence
  Synthetic
agaagggagaauggugcca

SEQ ID NO: 3026 - RNA, 19 nt, Artificial Sequence
  Synthetic
gaggcucagacaaaacaca

SEQ ID NO: 3027 - RNA, 19 nt, Artificial Sequence
  Synthetic
agaggcucagacaaaacac

SEQ ID NO: 3028 - RNA, 19 nt, Artificial Sequence
  Synthetic
gagaggcucagacaaaaca

SEQ ID NO: 3029 - RNA, 19 nt, Artificial Sequence
  Synthetic
agagaggcucagacaaaac

SEQ ID NO: 3030 - RNA, 19 nt, Artificial Sequence
  Synthetic
gagagaggcucagacaaaa

SEQ ID NO: 3031 - RNA, 19 nt, Artificial Sequence
  Synthetic
cgagagaggcucagacaaa

SEQ ID NO: 3032 - RNA, 19 nt, Artificial Sequence
  Synthetic
ccgagagaggcucagacaa

SEQ ID NO: 3033 - RNA, 19 nt, Artificial Sequence
  Synthetic
accgagagaggcucagaca

SEQ ID NO: 3034 - RNA, 19 nt, Artificial Sequence
  Synthetic
gaccgagagaggcucagac

SEQ ID NO: 3035 - RNA, 19 nt, Artificial Sequence
  Synthetic
ugaccgagagaggcucaga

SEQ ID NO: 3036 - RNA, 19 nt, Artificial Sequence
  Synthetic
uugaccgagagaggcucag

SEQ ID NO: 3037 - RNA, 19 nt, Artificial Sequence
  Synthetic
guugaccgagagaggcuca

SEQ ID NO: 3038 - RNA, 19 nt, Artificial Sequence
  Synthetic
uguugaccgagagaggcuc

SEQ ID NO: 3039 - RNA, 19 nt, Artificial Sequence
  Synthetic
cuguugaccgagagaggcu

SEQ ID NO: 3040 - RNA, 19 nt, Artificial Sequence
  Synthetic
gcuguugaccgagagaggc

SEQ ID NO: 3041 - RNA, 19 nt, Artificial Sequence
  Synthetic
ugcuguugaccgagagagg

SEQ ID NO: 3042 - RNA, 19 nt, Artificial Sequence
  Synthetic
uugcuguugaccgagagag

SEQ ID NO: 3043 - RNA, 19 nt, Artificial Sequence
  Synthetic
uuugcuguugaccgagaga

SEQ ID NO: 3044 - RNA, 19 nt, Artificial Sequence
  Synthetic
cuuugcuguugaccgagag

SEQ ID NO: 3045 - RNA, 19 nt, Artificial Sequence
  Synthetic
aaggcucagacaaaacaca

SEQ ID NO: 3046 - RNA, 19 nt, Artificial Sequence
  Synthetic
aaaggcucagacaaaacac

SEQ ID NO: 3047 - RNA, 19 nt, Artificial Sequence
  Synthetic
gaaaggcucagacaaaaca

SEQ ID NO: 3048 - RNA, 19 nt, Artificial Sequence
  Synthetic
agaaaggcucagacaaaac

SEQ ID NO: 3049 - RNA, 19 nt, Artificial Sequence
  Synthetic
gcuuugcuguugaccgaga

SEQ ID NO: 3050 - RNA, 19 nt, Artificial Sequence
  Synthetic
agcuuugcuguugaccgag

SEQ ID NO: 3051 - RNA, 19 nt, Artificial Sequence
  Synthetic
aagcuuugcuguugaccga

SEQ ID NO: 3052 - RNA, 19 nt, Artificial Sequence
  Synthetic
caagcuuugcuguugaccg

SEQ ID NO: 3053 - RNA, 19 nt, Artificial Sequence
  Synthetic
aagagaggcucagacaaaa

SEQ ID NO: 3054 - RNA, 19 nt, Artificial Sequence
  Synthetic
caagagaggcucagacaaa

SEQ ID NO: 3055 - RNA, 19 nt, Artificial Sequence
  Synthetic
ccaagagaggcucagacaa

SEQ ID NO: 3056 - RNA, 19 nt, Artificial Sequence
  Synthetic
accaagagaggcucagaca

SEQ ID NO: 3057 - RNA, 19 nt, Artificial Sequence
  Synthetic
gaccaagagaggcucagac

SEQ ID NO: 3058 - RNA, 19 nt, Artificial Sequence
  Synthetic
ugaccaagagaggcucaga

SEQ ID NO: 3059 - RNA, 19 nt, Artificial Sequence
  Synthetic
uugaccaagagaggcucag

SEQ ID NO: 3060 - RNA, 19 nt, Artificial Sequence
  Synthetic
guugaccaagagaggcuca

SEQ ID NO: 3061 - RNA, 19 nt, Artificial Sequence
  Synthetic
uguugaccaagagaggcuc

SEQ ID NO: 3062 - RNA, 19 nt, Artificial Sequence
  Synthetic
cuguugaccaagagaggcu

SEQ ID NO: 3063 - RNA, 19 nt, Artificial Sequence
  Synthetic
gcuguugaccaagagaggc

SEQ ID NO: 3064 - RNA, 19 nt, Artificial Sequence
  Synthetic
ugcuguugaccaagagagg

SEQ ID NO: 3065 - RNA, 19 nt, Artificial Sequence
  Synthetic
uugcuguugaccaagagag

SEQ ID NO: 3066 - RNA, 19 nt, Artificial Sequence
  Synthetic
uuugcuguugaccaagaga

SEQ ID NO: 3067 - RNA, 19 nt, Artificial Sequence
  Synthetic
cuuugcuguugaccaagag

SEQ ID NO: 3068 - RNA, 19 nt, Artificial Sequence
  Synthetic
gcuuugcuguugaccaaga

SEQ ID NO: 3069 - RNA, 19 nt, Artificial Sequence
  Synthetic
agcuuugcuguugaccaag

SEQ ID NO: 3070 - RNA, 19 nt, Artificial Sequence
  Synthetic
aagcuuugcuguugaccaa

SEQ ID NO: 3071 - RNA, 19 nt, Artificial Sequence
  Synthetic
caagcuuugcuguugacca

SEQ ID NO: 3072 - RNA, 19 nt, Artificial Sequence
  Synthetic
ccgugcaagaugucagcug

SEQ ID NO: 3073 - RNA, 19 nt, Artificial Sequence
  Synthetic
accgugcaagaugucagcu

SEQ ID NO: 3074 - RNA, 19 nt, Artificial Sequence
  Synthetic
caccgugcaagaugucagc

SEQ ID NO: 3075 - RNA, 19 nt, Artificial Sequence
  Synthetic
ucaccgugcaagaugucag

SEQ ID NO: 3076 - RNA, 19 nt, Artificial Sequence
  Synthetic
gucaccgugcaagauguca

SEQ ID NO: 3077 - RNA, 19 nt, Artificial Sequence
  Synthetic
ggucaccgugcaagauguc

SEQ ID NO: 3078 - RNA, 19 nt, Artificial Sequence
  Synthetic
gggucaccgugcaagaugu

SEQ ID NO: 3079 - RNA, 19 nt, Artificial Sequence
  Synthetic
ggggucaccgugcaagaug

SEQ ID NO: 3080 - RNA, 19 nt, Artificial Sequence
  Synthetic
aggggucaccgugcaagau

SEQ ID NO: 3081 - RNA, 19 nt, Artificial Sequence
  Synthetic
aaggggucaccgugcaaga

SEQ ID NO: 3082 - RNA, 19 nt, Artificial Sequence
  Synthetic
aaaggggucaccgugcaag

SEQ ID NO: 3083 - RNA, 19 nt, Artificial Sequence
  Synthetic
aaaaggggucaccgugcaa

SEQ ID NO: 3084 - RNA, 19 nt, Artificial Sequence
  Synthetic
uaaaaggggucaccgugca

SEQ ID NO: 3085 - RNA, 19 nt, Artificial Sequence
  Synthetic
cuaaaaggggucaccgugc

SEQ ID NO: 3086 - RNA, 19 nt, Artificial Sequence
  Synthetic
acuaaaaggggucaccgug

SEQ ID NO: 3087 - RNA, 19 nt, Artificial Sequence
  Synthetic
gacuaaaaggggucaccgu

SEQ ID NO: 3088 - RNA, 19 nt, Artificial Sequence
  Synthetic
ugacuaaaaggggucaccg

SEQ ID NO: 3089 - RNA, 19 nt, Artificial Sequence
  Synthetic
cugacuaaaaggggucacc

SEQ ID NO: 3090 - RNA, 19 nt, Artificial Sequence
  Synthetic
ccugacuaaaaggggucac

SEQ ID NO: 3091 - RNA, 19 nt, Artificial Sequence
  Synthetic
acgugcaagaugucagcug

SEQ ID NO: 3092 - RNA, 19 nt, Artificial Sequence
  Synthetic
aacgugcaagaugucagcu

SEQ ID NO: 3093 - RNA, 19 nt, Artificial Sequence
  Synthetic
caacgugcaagaugucagc

SEQ ID NO: 3094 - RNA, 19 nt, Artificial Sequence
  Synthetic
ucaacgugcaagaugucag

SEQ ID NO: 3095 - RNA, 19 nt, Artificial Sequence
  Synthetic
gucaacgugcaagauguca

SEQ ID NO: 3096 - RNA, 19 nt, Artificial Sequence
  Synthetic
ggucaacgugcaagauguc

SEQ ID NO: 3097 - RNA, 19 nt, Artificial Sequence
  Synthetic
gggucaacgugcaagaugu

SEQ ID NO: 3098 - RNA, 19 nt, Artificial Sequence
  Synthetic
ggggucaacgugcaagaug

SEQ ID NO: 3099 - RNA, 19 nt, Artificial Sequence
  Synthetic
aggggucaacgugcaagau

SEQ ID NO: 3100 - RNA, 19 nt, Artificial Sequence
  Synthetic
aaggggucaacgugcaaga

SEQ ID NO: 3101 - RNA, 19 nt, Artificial Sequence
  Synthetic
aaaggggucaacgugcaag

SEQ ID NO: 3102 - RNA, 19 nt, Artificial Sequence
  Synthetic
aaaaggggucaacgugcaa

SEQ ID NO: 3103 - RNA, 19 nt, Artificial Sequence
  Synthetic
uaaaaggggucaacgugca

SEQ ID NO: 3104 - RNA, 19 nt, Artificial Sequence
  Synthetic
cuaaaaggggucaacgugc

SEQ ID NO: 3105 - RNA, 19 nt, Artificial Sequence
  Synthetic
acuaaaaggggucaacgug

SEQ ID NO: 3106 - RNA, 19 nt, Artificial Sequence
  Synthetic
gacuaaaaggggucaacgu

SEQ ID NO: 3107 - RNA, 19 nt, Artificial Sequence
  Synthetic
ugacuaaaaggggucaacg

SEQ ID NO: 3108 - RNA, 19 nt, Artificial Sequence
  Synthetic
cugacuaaaaggggucaac

SEQ ID NO: 3109 - RNA, 19 nt, Artificial Sequence
  Synthetic
ccugacuaaaaggggucaa

SEQ ID NO: 3110 - RNA, 19 nt, Artificial Sequence
  Synthetic
ggcaagcagagcucccaaa

SEQ ID NO: 3111 - RNA, 19 nt, Artificial Sequence
  Synthetic
cggcaagcagagcucccaa

SEQ ID NO: 3112 - RNA, 19 nt, Artificial Sequence
  Synthetic
ucggcaagcagagcuccca

SEQ ID NO: 3113 - RNA, 19 nt, Artificial Sequence
  Synthetic
gucggcaagcagagcuccc

SEQ ID NO: 3114 - RNA, 19 nt, Artificial Sequence
  Synthetic
agucggcaagcagagcucc

SEQ ID NO: 3115 - RNA, 19 nt, Artificial Sequence
  Synthetic
cagucggcaagcagagcuc

SEQ ID NO: 3116 - RNA, 19 nt, Artificial Sequence
  Synthetic
ccagucggcaagcagagcu

SEQ ID NO: 3117 - RNA, 19 nt, Artificial Sequence
  Synthetic
gccagucggcaagcagagc

SEQ ID NO: 3118 - RNA, 19 nt, Artificial Sequence
  Synthetic
agccagucggcaagcagag

SEQ ID NO: 3119 - RNA, 19 nt, Artificial Sequence
  Synthetic
cagccagucggcaagcaga

SEQ ID NO: 3120 - RNA, 19 nt, Artificial Sequence
  Synthetic
acagccagucggcaagcag

SEQ ID NO: 3121 - RNA, 19 nt, Artificial Sequence
  Synthetic
cacagccagucggcaagca

SEQ ID NO: 3122 - RNA, 19 nt, Artificial Sequence
  Synthetic
ucacagccagucggcaagc

SEQ ID NO: 3123 - RNA, 19 nt, Artificial Sequence
  Synthetic
cucacagccagucggcaag

SEQ ID NO: 3124 - RNA, 19 nt, Artificial Sequence
  Synthetic
ucucacagccagucggcaa

SEQ ID NO: 3125 - RNA, 19 nt, Artificial Sequence
  Synthetic
gucucacagccagucggca

SEQ ID NO: 3126 - RNA, 19 nt, Artificial Sequence
  Synthetic
cgucucacagccagucggc

SEQ ID NO: 3127 - RNA, 19 nt, Artificial Sequence
  Synthetic
ucgucucacagccagucgg

SEQ ID NO: 3128 - RNA, 19 nt, Artificial Sequence
  Synthetic
cucgucucacagccagucg

SEQ ID NO: 3129 - RNA, 19 nt, Artificial Sequence
  Synthetic
agcaagcagagcucccaaa

SEQ ID NO: 3130 - RNA, 19 nt, Artificial Sequence
  Synthetic
cagcaagcagagcucccaa

SEQ ID NO: 3131 - RNA, 19 nt, Artificial Sequence
  Synthetic
ucagcaagcagagcuccca

SEQ ID NO: 3132 - RNA, 19 nt, Artificial Sequence
  Synthetic
gucagcaagcagagcuccc

SEQ ID NO: 3133 - RNA, 19 nt, Artificial Sequence
  Synthetic
agucagcaagcagagcucc

SEQ ID NO: 3134 - RNA, 19 nt, Artificial Sequence
  Synthetic
cagucagcaagcagagcuc

SEQ ID NO: 3135 - RNA, 19 nt, Artificial Sequence
  Synthetic
ccagucagcaagcagagcu

SEQ ID NO: 3136 - RNA, 19 nt, Artificial Sequence
  Synthetic
gccagucagcaagcagagc

SEQ ID NO: 3137 - RNA, 19 nt, Artificial Sequence
  Synthetic
agccagucagcaagcagag

SEQ ID NO: 3138 - RNA, 19 nt, Artificial Sequence
  Synthetic
cagccagucagcaagcaga

SEQ ID NO: 3139 - RNA, 19 nt, Artificial Sequence
  Synthetic
acagccagucagcaagcag

SEQ ID NO: 3140 - RNA, 19 nt, Artificial Sequence
  Synthetic
cacagccagucagcaagca

SEQ ID NO: 3141 - RNA, 19 nt, Artificial Sequence
  Synthetic
ucacagccagucagcaagc

SEQ ID NO: 3142 - RNA, 19 nt, Artificial Sequence
  Synthetic
cucacagccagucagcaag

SEQ ID NO: 3143 - RNA, 19 nt, Artificial Sequence
  Synthetic
ucucacagccagucagcaa

SEQ ID NO: 3144 - RNA, 19 nt, Artificial Sequence
  Synthetic
gucucacagccagucagca

SEQ ID NO: 3145 - RNA, 19 nt, Artificial Sequence
  Synthetic
cgucucacagccagucagc

SEQ ID NO: 3146 - RNA, 19 nt, Artificial Sequence
  Synthetic
ucgucucacagccagucag

SEQ ID NO: 3147 - RNA, 19 nt, Artificial Sequence
  Synthetic
cucgucucacagccaguca

SEQ ID NO: 3148 - RNA, 19 nt, Artificial Sequence
  Synthetic
agcugcuccccagcugcca

SEQ ID NO: 3149 - RNA, 19 nt, Artificial Sequence
  Synthetic
cagcugcuccccagcugcc

SEQ ID NO: 3150 - RNA, 19 nt, Artificial Sequence
  Synthetic
ucagcugcuccccagcugc

SEQ ID NO: 3151 - RNA, 19 nt, Artificial Sequence
  Synthetic
cucagcugcuccccagcug

SEQ ID NO: 3152 - RNA, 19 nt, Artificial Sequence
  Synthetic
ucucagcugcuccccagcu

SEQ ID NO: 3153 - RNA, 19 nt, Artificial Sequence
  Synthetic
aucucagcugcuccccagc

SEQ ID NO: 3154 - RNA, 19 nt, Artificial Sequence
  Synthetic
caucucagcugcuccccag

SEQ ID NO: 3155 - RNA, 19 nt, Artificial Sequence
  Synthetic
acaucucagcugcucccca

SEQ ID NO: 3156 - RNA, 19 nt, Artificial Sequence
  Synthetic
cacaucucagcugcucccc

SEQ ID NO: 3157 - RNA, 19 nt, Artificial Sequence
  Synthetic
ccacaucucagcugcuccc

SEQ ID NO: 3158 - RNA, 19 nt, Artificial Sequence
  Synthetic
uccacaucucagcugcucc

SEQ ID NO: 3159 - RNA, 19 nt, Artificial Sequence
  Synthetic
guccacaucucagcugcuc

SEQ ID NO: 3160 - RNA, 19 nt, Artificial Sequence
  Synthetic
aguccacaucucagcugcu

SEQ ID NO: 3161 - RNA, 19 nt, Artificial Sequence
  Synthetic
aaguccacaucucagcugc

SEQ ID NO: 3162 - RNA, 19 nt, Artificial Sequence
  Synthetic
caaguccacaucucagcug

SEQ ID NO: 3163 - RNA, 19 nt, Artificial Sequence
  Synthetic
acaaguccacaucucagcu

SEQ ID NO: 3164 - RNA, 19 nt, Artificial Sequence
  Synthetic
uacaaguccacaucucagc

SEQ ID NO: 3165 - RNA, 19 nt, Artificial Sequence
  Synthetic
auacaaguccacaucucag

SEQ ID NO: 3166 - RNA, 19 nt, Artificial Sequence
  Synthetic
cauacaaguccacaucuca

SEQ ID NO: 3167 - RNA, 19 nt, Artificial Sequence
  Synthetic
cgcugcuccccagcugcca

SEQ ID NO: 3168 - RNA, 19 nt, Artificial Sequence
  Synthetic
ccgcugcuccccagcugcc

SEQ ID NO: 3169 - RNA, 19 nt, Artificial Sequence
  Synthetic
uccgcugcuccccagcugc

SEQ ID NO: 3170 - RNA, 19 nt, Artificial Sequence
  Synthetic
cuccgcugcuccccagcug

SEQ ID NO: 3171 - RNA, 19 nt, Artificial Sequence
  Synthetic
ucuccgcugcuccccagcu

SEQ ID NO: 3172 - RNA, 19 nt, Artificial Sequence
  Synthetic
aucuccgcugcuccccagc

SEQ ID NO: 3173 - RNA, 19 nt, Artificial Sequence
  Synthetic
caucuccgcugcuccccag

SEQ ID NO: 3174 - RNA, 19 nt, Artificial Sequence
  Synthetic
acaucuccgcugcucccca

SEQ ID NO: 3175 - RNA, 19 nt, Artificial Sequence
  Synthetic
cacaucuccgcugcucccc

SEQ ID NO: 3176 - RNA, 19 nt, Artificial Sequence
  Synthetic
ccacaucuccgcugcuccc

SEQ ID NO: 3177 - RNA, 19 nt, Artificial Sequence
  Synthetic
uccacaucuccgcugcucc

SEQ ID NO: 3178 - RNA, 19 nt, Artificial Sequence
  Synthetic
guccacaucuccgcugcuc

SEQ ID NO: 3179 - RNA, 19 nt, Artificial Sequence
  Synthetic
aguccacaucuccgcugcu

SEQ ID NO: 3180 - RNA, 19 nt, Artificial Sequence
  Synthetic
aaguccacaucuccgcugc

SEQ ID NO: 3181 - RNA, 19 nt, Artificial Sequence
  Synthetic
caaguccacaucuccgcug

SEQ ID NO: 3182 - RNA, 19 nt, Artificial Sequence
  Synthetic
acaaguccacaucuccgcu

SEQ ID NO: 3183 - RNA, 19 nt, Artificial Sequence
  Synthetic
uacaaguccacaucuccgc

SEQ ID NO: 3184 - RNA, 19 nt, Artificial Sequence
  Synthetic
auacaaguccacaucuccg

SEQ ID NO: 3185 - RNA, 19 nt, Artificial Sequence
  Synthetic
cauacaaguccacaucucc

SEQ ID NO: 3186 - RNA, 19 nt, Artificial Sequence
  Synthetic
caggggcucccuuucagcu

SEQ ID NO: 3187 - RNA, 19 nt, Artificial Sequence
  Synthetic
gcaggggcucccuuucagc

SEQ ID NO: 3188 - RNA, 19 nt, Artificial Sequence
  Synthetic
agcaggggcucccuuucag

SEQ ID NO: 3189 - RNA, 19 nt, Artificial Sequence
  Synthetic
gagcaggggcucccuuuca

SEQ ID NO: 3190 - RNA, 19 nt, Artificial Sequence
  Synthetic
ugagcaggggcucccuuuc

SEQ ID NO: 3191 - RNA, 19 nt, Artificial Sequence
  Synthetic
uugagcaggggcucccuuu

SEQ ID NO: 3192 - RNA, 19 nt, Artificial Sequence
  Synthetic
uuugagcaggggcucccuu

SEQ ID NO: 3193 - RNA, 19 nt, Artificial Sequence
  Synthetic
cuuugagcaggggcucccu

SEQ ID NO: 3194 - RNA, 19 nt, Artificial Sequence
  Synthetic
ccuuugagcaggggcuccc

SEQ ID NO: 3195 - RNA, 19 nt, Artificial Sequence
  Synthetic
cccuuugagcaggggcucc

SEQ ID NO: 3196 - RNA, 19 nt, Artificial Sequence
  Synthetic
ucccuuugagcaggggcuc

SEQ ID NO: 3197 - RNA, 19 nt, Artificial Sequence
  Synthetic
cucccuuugagcaggggcu

SEQ ID NO: 3198 - RNA, 19 nt, Artificial Sequence
  Synthetic
gcucccuuugagcaggggc

SEQ ID NO: 3199 - RNA, 19 nt, Artificial Sequence
  Synthetic
ggcucccuuugagcagggg

SEQ ID NO: 3200 - RNA, 19 nt, Artificial Sequence
  Synthetic
gggcucccuuugagcaggg

SEQ ID NO: 3201 - RNA, 19 nt, Artificial Sequence
  Synthetic
ggggcucccuuugagcagg

SEQ ID NO: 3202 - RNA, 19 nt, Artificial Sequence
  Synthetic
aggggcucccuuugagcag

SEQ ID NO: 3203 - RNA, 19 nt, Artificial Sequence
  Synthetic
gaggggcucccuuugagca

SEQ ID NO: 3204 - RNA, 19 nt, Artificial Sequence
  Synthetic
ggaggggcucccuuugagc

SEQ ID NO: 3205 - RNA, 19 nt, Artificial Sequence
  Synthetic
aggaggggcucccuuugag

SEQ ID NO: 3206 - RNA, 19 nt, Artificial Sequence
  Synthetic
gaggaggggcucccuuuga

SEQ ID NO: 3207 - RNA, 19 nt, Artificial Sequence
  Synthetic
agaggaggggcucccuuug

SEQ ID NO: 3208 - RNA, 19 nt, Artificial Sequence
  Synthetic
gaggggcucccuuucagcu

SEQ ID NO: 3209 - RNA, 19 nt, Artificial Sequence
  Synthetic
ggaggggcucccuuucagc

SEQ ID NO: 3210 - RNA, 19 nt, Artificial Sequence
  Synthetic
aggaggggcucccuuucag

SEQ ID NO: 3211 - RNA, 19 nt, Artificial Sequence
  Synthetic
gaggaggggcucccuuuca

SEQ ID NO: 3212 - RNA, 19 nt, Artificial Sequence
  Synthetic
agaggaggggcucccuuuc

SEQ ID NO: 3213 - RNA, 19 nt, Artificial Sequence
  Synthetic
agaauggugauuuucuuac

SEQ ID NO: 3214 - RNA, 19 nt, Artificial Sequence
  Synthetic
aagaauggugauuuucuua

SEQ ID NO: 3215 - RNA, 19 nt, Artificial Sequence
  Synthetic
gaagaauggugauuuucuu

SEQ ID NO: 3216 - RNA, 19 nt, Artificial Sequence
  Synthetic
ggaagaauggugauuuucu

SEQ ID NO: 3217 - RNA, 19 nt, Artificial Sequence
  Synthetic
cggaagaauggugauuuuc

SEQ ID NO: 3218 - RNA, 19 nt, Artificial Sequence
  Synthetic
acggaagaauggugauuuu

SEQ ID NO: 3219 - RNA, 19 nt, Artificial Sequence
  Synthetic
uacggaagaauggugauuu

SEQ ID NO: 3220 - RNA, 19 nt, Artificial Sequence
  Synthetic
auacggaagaauggugauu

SEQ ID NO: 3221 - RNA, 19 nt, Artificial Sequence
  Synthetic
aauacggaagaauggugau

SEQ ID NO: 3222 - RNA, 19 nt, Artificial Sequence
  Synthetic
caauacggaagaaugguga

SEQ ID NO: 3223 - RNA, 19 nt, Artificial Sequence
  Synthetic
ccaauacggaagaauggug

SEQ ID NO: 3224 - RNA, 19 nt, Artificial Sequence
  Synthetic
accaauacggaagaauggu

SEQ ID NO: 3225 - RNA, 19 nt, Artificial Sequence
  Synthetic
aaccaauacggaagaaugg

SEQ ID NO: 3226 - RNA, 19 nt, Artificial Sequence
  Synthetic
caaccaauacggaagaaug

SEQ ID NO: 3227 - RNA, 19 nt, Artificial Sequence
  Synthetic
ccaaccaauacggaagaau

SEQ ID NO: 3228 - RNA, 19 nt, Artificial Sequence
  Synthetic
cccaaccaauacggaagaa

SEQ ID NO: 3229 - RNA, 19 nt, Artificial Sequence
  Synthetic
ggaauggugauuuucuuac

SEQ ID NO: 3230 - RNA, 19 nt, Artificial Sequence
  Synthetic
cggaauggugauuuucuua

SEQ ID NO: 3231 - RNA, 19 nt, Artificial Sequence
  Synthetic
acggaauggugauuuucuu

SEQ ID NO: 3232 - RNA, 19 nt, Artificial Sequence
  Synthetic
uacggaauggugauuuucu

SEQ ID NO: 3233 - RNA, 19 nt, Artificial Sequence
  Synthetic
auacggaauggugauuuuc

SEQ ID NO: 3234 - RNA, 19 nt, Artificial Sequence
  Synthetic
aauacggaauggugauuuu

SEQ ID NO: 3235 - RNA, 19 nt, Artificial Sequence
  Synthetic
caauacggaauggugauuu

SEQ ID NO: 3236 - RNA, 19 nt, Artificial Sequence
  Synthetic
ccaauacggaauggugauu

SEQ ID NO: 3237 - RNA, 19 nt, Artificial Sequence
  Synthetic
accaauacggaauggugau

SEQ ID NO: 3238 - RNA, 19 nt, Artificial Sequence
  Synthetic
aaccaauacggaaugguga

SEQ ID NO: 3239 - RNA, 19 nt, Artificial Sequence
  Synthetic
caaccaauacggaauggug

SEQ ID NO: 3240 - RNA, 19 nt, Artificial Sequence
  Synthetic
ccaaccaauacggaauggu

SEQ ID NO: 3241 - RNA, 19 nt, Artificial Sequence
  Synthetic
cccaaccaauacggaaugg

SEQ ID NO: 3242 - RNA, 19 nt, Artificial Sequence
  Synthetic
gcaacaguucugagaacuu

SEQ ID NO: 3243 - RNA, 19 nt, Artificial Sequence
  Synthetic
agcaacaguucugagaacu

SEQ ID NO: 3244 - RNA, 19 nt, Artificial Sequence
  Synthetic
cagcaacaguucugagaac

SEQ ID NO: 3245 - RNA, 19 nt, Artificial Sequence
  Synthetic
gcagcaacaguucugagaa

SEQ ID NO: 3246 - RNA, 19 nt, Artificial Sequence
  Synthetic
agcagcaacaguucugaga

SEQ ID NO: 3247 - RNA, 19 nt, Artificial Sequence
  Synthetic
gagcagcaacaguucugag

SEQ ID NO: 3248 - RNA, 19 nt, Artificial Sequence
  Synthetic
ggagcagcaacaguucuga

SEQ ID NO: 3249 - RNA, 19 nt, Artificial Sequence
  Synthetic
gggagcagcaacaguucug

SEQ ID NO: 3250 - RNA, 19 nt, Artificial Sequence
  Synthetic
ggggagcagcaacaguucu

SEQ ID NO: 3251 - RNA, 19 nt, Artificial Sequence
  Synthetic
uggggagcagcaacaguuc

SEQ ID NO: 3252 - RNA, 19 nt, Artificial Sequence
  Synthetic
guggggagcagcaacaguu

SEQ ID NO: 3253 - RNA, 19 nt, Artificial Sequence
  Synthetic
gguggggagcagcaacagu

SEQ ID NO: 3254 - RNA, 19 nt, Artificial Sequence
  Synthetic
ggguggggagcagcaacag

SEQ ID NO: 3255 - RNA, 19 nt, Artificial Sequence
  Synthetic
cggguggggagcagcaaca

SEQ ID NO: 3256 - RNA, 19 nt, Artificial Sequence
  Synthetic
gcggguggggagcagcaac

SEQ ID NO: 3257 - RNA, 19 nt, Artificial Sequence
  Synthetic
ggcggguggggagcagcaa

SEQ ID NO: 3258 - RNA, 19 nt, Artificial Sequence
  Synthetic
aggcggguggggagcagca

SEQ ID NO: 3259 - RNA, 19 nt, Artificial Sequence
  Synthetic
ccaacaguucugagaacuu

SEQ ID NO: 3260 - RNA, 19 nt, Artificial Sequence
  Synthetic
gccaacaguucugagaacu

SEQ ID NO: 3261 - RNA, 19 nt, Artificial Sequence
  Synthetic
agccaacaguucugagaac

SEQ ID NO: 3262 - RNA, 19 nt, Artificial Sequence
  Synthetic
cagccaacaguucugagaa

SEQ ID NO: 3263 - RNA, 19 nt, Artificial Sequence
  Synthetic
gcagccaacaguucugaga

SEQ ID NO: 3264 - RNA, 19 nt, Artificial Sequence
  Synthetic
agcagccaacaguucugag

SEQ ID NO: 3265 - RNA, 19 nt, Artificial Sequence
  Synthetic
gagcagccaacaguucuga

SEQ ID NO: 3266 - RNA, 19 nt, Artificial Sequence
  Synthetic
ggagcagccaacaguucug

SEQ ID NO: 3267 - RNA, 19 nt, Artificial Sequence
  Synthetic
gggagcagccaacaguucu

SEQ ID NO: 3268 - RNA, 19 nt, Artificial Sequence
  Synthetic
ggggagcagccaacaguuc

SEQ ID NO: 3269 - RNA, 19 nt, Artificial Sequence
  Synthetic
uggggagcagccaacaguu

SEQ ID NO: 3270 - RNA, 19 nt, Artificial Sequence
  Synthetic
guggggagcagccaacagu

SEQ ID NO: 3271 - RNA, 19 nt, Artificial Sequence
  Synthetic
gguggggagcagccaacag

SEQ ID NO: 3272 - RNA, 19 nt, Artificial Sequence
  Synthetic
ggguggggagcagccaaca

SEQ ID NO: 3273 - RNA, 19 nt, Artificial Sequence
  Synthetic
cggguggggagcagccaac

SEQ ID NO: 3274 - RNA, 19 nt, Artificial Sequence
  Synthetic
gcggguggggagcagccaa

SEQ ID NO: 3275 - RNA, 19 nt, Artificial Sequence
  Synthetic
ggcggguggggagcagcca

SEQ ID NO: 3276 - RNA, 19 nt, Artificial Sequence
  Synthetic
aggcggguggggagcagcc

SEQ ID NO: 3277 - RNA, 19 nt, Artificial Sequence
  Synthetic
cuuacaaauguaaacaucu

SEQ ID NO: 3278 - RNA, 19 nt, Artificial Sequence
  Synthetic
ucuuacaaauguaaacauc

SEQ ID NO: 3279 - RNA, 19 nt, Artificial Sequence
  Synthetic
uucuuacaaauguaaacau

SEQ ID NO: 3280 - RNA, 19 nt, Artificial Sequence
  Synthetic
uuucuuacaaauguaaaca

SEQ ID NO: 3281 - RNA, 19 nt, Artificial Sequence
  Synthetic
auuucuuacaaauguaaac

SEQ ID NO: 3282 - RNA, 19 nt, Artificial Sequence
  Synthetic
uauuucuuacaaauguaaa

SEQ ID NO: 3283 - RNA, 19 nt, Artificial Sequence
  Synthetic
uuauuucuuacaaauguaa

SEQ ID NO: 3284 - RNA, 19 nt, Artificial Sequence
  Synthetic
guuauuucuuacaaaugua

SEQ ID NO: 3285 - RNA, 19 nt, Artificial Sequence
  Synthetic
uguuauuucuuacaaaugu

SEQ ID NO: 3286 - RNA, 19 nt, Artificial Sequence
  Synthetic
guguuauuucuuacaaaug

SEQ ID NO: 3287 - RNA, 19 nt, Artificial Sequence
  Synthetic
aguguuauuucuuacaaau

SEQ ID NO: 3288 - RNA, 19 nt, Artificial Sequence
  Synthetic
caguguuauuucuuacaaa

SEQ ID NO: 3289 - RNA, 19 nt, Artificial Sequence
  Synthetic
acaguguuauuucuuacaa

SEQ ID NO: 3290 - RNA, 19 nt, Artificial Sequence
  Synthetic
cacaguguuauuucuuaca

SEQ ID NO: 3291 - RNA, 19 nt, Artificial Sequence
  Synthetic
ucacaguguuauuucuuac

SEQ ID NO: 3292 - RNA, 19 nt, Artificial Sequence
  Synthetic
uucacaguguuauuucuua

SEQ ID NO: 3293 - RNA, 19 nt, Artificial Sequence
  Synthetic
auucacaguguuauuucuu

SEQ ID NO: 3294 - RNA, 19 nt, Artificial Sequence
  Synthetic
cauucacaguguuauuucu

SEQ ID NO: 3295 - RNA, 19 nt, Artificial Sequence
  Synthetic
acauucacaguguuauuuc

SEQ ID NO: 3296 - RNA, 19 nt, Artificial Sequence
  Synthetic
uuuacaaauguaaacaucu

SEQ ID NO: 3297 - RNA, 19 nt, Artificial Sequence
  Synthetic
uuuuacaaauguaaacauc

SEQ ID NO: 3298 - RNA, 19 nt, Artificial Sequence
  Synthetic
uuuuuacaaauguaaacau

SEQ ID NO: 3299 - RNA, 19 nt, Artificial Sequence
  Synthetic
uuuuuuacaaauguaaaca

SEQ ID NO: 3300 - RNA, 19 nt, Artificial Sequence
  Synthetic
auuuuuuacaaauguaaac

SEQ ID NO: 3301 - RNA, 19 nt, Artificial Sequence
  Synthetic
uauuuuuuacaaauguaaa

SEQ ID NO: 3302 - RNA, 19 nt, Artificial Sequence
  Synthetic
uuauuuuuuacaaauguaa

SEQ ID NO: 3303 - RNA, 19 nt, Artificial Sequence
  Synthetic
guuauuuuuuacaaaugua

SEQ ID NO: 3304 - RNA, 19 nt, Artificial Sequence
  Synthetic
uguuauuuuuuacaaaugu

SEQ ID NO: 3305 - RNA, 19 nt, Artificial Sequence
  Synthetic
guguuauuuuuuacaaaug

SEQ ID NO: 3306 - RNA, 19 nt, Artificial Sequence
  Synthetic
aguguuauuuuuuacaaau

SEQ ID NO: 3307 - RNA, 19 nt, Artificial Sequence
  Synthetic
caguguuauuuuuuacaaa

SEQ ID NO: 3308 - RNA, 19 nt, Artificial Sequence
  Synthetic
acaguguuauuuuuuacaa

SEQ ID NO: 3309 - RNA, 19 nt, Artificial Sequence
  Synthetic
cacaguguuauuuuuuaca

SEQ ID NO: 3310 - RNA, 19 nt, Artificial Sequence
  Synthetic
ucacaguguuauuuuuuac

SEQ ID NO: 3311 - RNA, 19 nt, Artificial Sequence
  Synthetic
uucacaguguuauuuuuua

SEQ ID NO: 3312 - RNA, 19 nt, Artificial Sequence
  Synthetic
auucacaguguuauuuuuu

SEQ ID NO: 3313 - RNA, 19 nt, Artificial Sequence
  Synthetic
cauucacaguguuauuuuu

SEQ ID NO: 3314 - RNA, 19 nt, Artificial Sequence
  Synthetic
acauucacaguguuauuuu

SEQ ID NO: 3315 - RNA, 19 nt, Artificial Sequence
  Synthetic
cgcuggcagaaaugagggu

SEQ ID NO: 3316 - RNA, 19 nt, Artificial Sequence
  Synthetic
gcgcuggcagaaaugaggg

SEQ ID NO: 3317 - RNA, 19 nt, Artificial Sequence
  Synthetic
ugcgcuggcagaaaugagg

SEQ ID NO: 3318 - RNA, 19 nt, Artificial Sequence
  Synthetic
augcgcuggcagaaaugag

SEQ ID NO: 3319 - RNA, 19 nt, Artificial Sequence
  Synthetic
caugcgcuggcagaaauga

SEQ ID NO: 3320 - RNA, 19 nt, Artificial Sequence
  Synthetic
acaugcgcuggcagaaaug

SEQ ID NO: 3321 - RNA, 19 nt, Artificial Sequence
  Synthetic
cacaugcgcuggcagaaau

SEQ ID NO: 3322 - RNA, 19 nt, Artificial Sequence
  Synthetic
acacaugcgcuggcagaaa

SEQ ID NO: 3323 - RNA, 19 nt, Artificial Sequence
  Synthetic
gacacaugcgcuggcagaa

SEQ ID NO: 3324 - RNA, 19 nt, Artificial Sequence
  Synthetic
ggacacaugcgcuggcaga

SEQ ID NO: 3325 - RNA, 19 nt, Artificial Sequence
  Synthetic
aggacacaugcgcuggcag

SEQ ID NO: 3326 - RNA, 19 nt, Artificial Sequence
  Synthetic
aaggacacaugcgcuggca

SEQ ID NO: 3327 - RNA, 19 nt, Artificial Sequence
  Synthetic
aaaggacacaugcgcuggc

SEQ ID NO: 3328 - RNA, 19 nt, Artificial Sequence
  Synthetic
gaaaggacacaugcgcugg

SEQ ID NO: 3329 - RNA, 19 nt, Artificial Sequence
  Synthetic
ugaaaggacacaugcgcug

SEQ ID NO: 3330 - RNA, 19 nt, Artificial Sequence
  Synthetic
uugaaaggacacaugcgcu

SEQ ID NO: 3331 - RNA, 19 nt, Artificial Sequence
  Synthetic
cuugaaaggacacaugcgc

SEQ ID NO: 3332 - RNA, 19 nt, Artificial Sequence
  Synthetic
ccuugaaaggacacaugcg

SEQ ID NO: 3333 - RNA, 19 nt, Artificial Sequence
  Synthetic
cccuugaaaggacacaugc

SEQ ID NO: 3334 - RNA, 19 nt, Artificial Sequence
  Synthetic
ugcuggcagaaaugagggu

SEQ ID NO: 3335 - RNA, 19 nt, Artificial Sequence
  Synthetic
gugcuggcagaaaugaggg

SEQ ID NO: 3336 - RNA, 19 nt, Artificial Sequence
  Synthetic
ugugcuggcagaaaugagg

SEQ ID NO: 3337 - RNA, 19 nt, Artificial Sequence
  Synthetic
augugcuggcagaaaugag

SEQ ID NO: 3338 - RNA, 19 nt, Artificial Sequence
  Synthetic
caugugcuggcagaaauga

SEQ ID NO: 3339 - RNA, 19 nt, Artificial Sequence
  Synthetic
acaugugcuggcagaaaug

SEQ ID NO: 3340 - RNA, 19 nt, Artificial Sequence
  Synthetic
cacaugugcuggcagaaau

SEQ ID NO: 3341 - RNA, 19 nt, Artificial Sequence
  Synthetic
acacaugugcuggcagaaa

SEQ ID NO: 3342 - RNA, 19 nt, Artificial Sequence
  Synthetic
gacacaugugcuggcagaa

SEQ ID NO: 3343 - RNA, 19 nt, Artificial Sequence
  Synthetic
ggacacaugugcuggcaga

SEQ ID NO: 3344 - RNA, 19 nt, Artificial Sequence
  Synthetic
aggacacaugugcuggcag

SEQ ID NO: 3345 - RNA, 19 nt, Artificial Sequence
  Synthetic
aaggacacaugugcuggca

SEQ ID NO: 3346 - RNA, 19 nt, Artificial Sequence
  Synthetic
aaaggacacaugugcuggc

SEQ ID NO: 3347 - RNA, 19 nt, Artificial Sequence
  Synthetic
gaaaggacacaugugcugg

SEQ ID NO: 3348 - RNA, 19 nt, Artificial Sequence
  Synthetic
ugaaaggacacaugugcug

SEQ ID NO: 3349 - RNA, 19 nt, Artificial Sequence
  Synthetic
uugaaaggacacaugugcu

SEQ ID NO: 3350 - RNA, 19 nt, Artificial Sequence
  Synthetic
cuugaaaggacacaugugc

SEQ ID NO: 3351 - RNA, 19 nt, Artificial Sequence
  Synthetic
ccuugaaaggacacaugug

SEQ ID NO: 3352 - RNA, 19 nt, Artificial Sequence
  Synthetic
cccuugaaaggacacaugu

SEQ ID NO: 3353 - RNA, 19 nt, Artificial Sequence
  Synthetic
cgggaggaaguuccaccug

SEQ ID NO: 3354 - RNA, 19 nt, Artificial Sequence
  Synthetic
acgggaggaaguuccaccu

SEQ ID NO: 3355 - RNA, 19 nt, Artificial Sequence
  Synthetic
aacgggaggaaguuccacc

SEQ ID NO: 3356 - RNA, 19 nt, Artificial Sequence
  Synthetic
caacgggaggaaguuccac

SEQ ID NO: 3357 - RNA, 19 nt, Artificial Sequence
  Synthetic
gcaacgggaggaaguucca

SEQ ID NO: 3358 - RNA, 19 nt, Artificial Sequence
  Synthetic
cgcaacgggaggaaguucc

SEQ ID NO: 3359 - RNA, 19 nt, Artificial Sequence
  Synthetic
ccgcaacgggaggaaguuc

SEQ ID NO: 3360 - RNA, 19 nt, Artificial Sequence
  Synthetic
cccgcaacgggaggaaguu

SEQ ID NO: 3361 - RNA, 19 nt, Artificial Sequence
  Synthetic
ccccgcaacgggaggaagu

SEQ ID NO: 3362 - RNA, 19 nt, Artificial Sequence
  Synthetic
accccgcaacgggaggaag

SEQ ID NO: 3363 - RNA, 19 nt, Artificial Sequence
  Synthetic
caccccgcaacgggaggaa

SEQ ID NO: 3364 - RNA, 19 nt, Artificial Sequence
  Synthetic
ccaccccgcaacgggagga

SEQ ID NO: 3365 - RNA, 19 nt, Artificial Sequence
  Synthetic
uccaccccgcaacgggagg

SEQ ID NO: 3366 - RNA, 19 nt, Artificial Sequence
  Synthetic
cuccaccccgcaacgggag

SEQ ID NO: 3367 - RNA, 19 nt, Artificial Sequence
  Synthetic
acuccaccccgcaacggga

SEQ ID NO: 3368 - RNA, 19 nt, Artificial Sequence
  Synthetic
cacuccaccccgcaacggg

SEQ ID NO: 3369 - RNA, 19 nt, Artificial Sequence
  Synthetic
ucacuccaccccgcaacgg

SEQ ID NO: 3370 - RNA, 19 nt, Artificial Sequence
  Synthetic
cucacuccaccccgcaacg

SEQ ID NO: 3371 - RNA, 19 nt, Artificial Sequence
  Synthetic
ccucacuccaccccgcaac

SEQ ID NO: 3372 - RNA, 19 nt, Artificial Sequence
  Synthetic
ugggaggaaguuccaccug

SEQ ID NO: 3373 - RNA, 19 nt, Artificial Sequence
  Synthetic
augggaggaaguuccaccu

SEQ ID NO: 3374 - RNA, 19 nt, Artificial Sequence
  Synthetic
aaugggaggaaguuccacc

SEQ ID NO: 3375 - RNA, 19 nt, Artificial Sequence
  Synthetic
caaugggaggaaguuccac

SEQ ID NO: 3376 - RNA, 19 nt, Artificial Sequence
  Synthetic
gcaaugggaggaaguucca

SEQ ID NO: 3377 - RNA, 19 nt, Artificial Sequence
  Synthetic
cgcaaugggaggaaguucc

SEQ ID NO: 3378 - RNA, 19 nt, Artificial Sequence
  Synthetic
ccgcaaugggaggaaguuc

SEQ ID NO: 3379 - RNA, 19 nt, Artificial Sequence
  Synthetic
cccgcaaugggaggaaguu

SEQ ID NO: 3380 - RNA, 19 nt, Artificial Sequence
  Synthetic
ccccgcaaugggaggaagu

SEQ ID NO: 3381 - RNA, 19 nt, Artificial Sequence
  Synthetic
accccgcaaugggaggaag

SEQ ID NO: 3382 - RNA, 19 nt, Artificial Sequence
  Synthetic
caccccgcaaugggaggaa

SEQ ID NO: 3383 - RNA, 19 nt, Artificial Sequence
  Synthetic
ccaccccgcaaugggagga

SEQ ID NO: 3384 - RNA, 19 nt, Artificial Sequence
  Synthetic
uccaccccgcaaugggagg

SEQ ID NO: 3385 - RNA, 19 nt, Artificial Sequence
  Synthetic
cuccaccccgcaaugggag

SEQ ID NO: 3386 - RNA, 19 nt, Artificial Sequence
  Synthetic
acuccaccccgcaauggga

SEQ ID NO: 3387 - RNA, 19 nt, Artificial Sequence
  Synthetic
cacuccaccccgcaauggg

SEQ ID NO: 3388 - RNA, 19 nt, Artificial Sequence
  Synthetic
ucacuccaccccgcaaugg

SEQ ID NO: 3389 - RNA, 19 nt, Artificial Sequence
  Synthetic
cucacuccaccccgcaaug

SEQ ID NO: 3390 - RNA, 19 nt, Artificial Sequence
  Synthetic
ccucacuccaccccgcaau

SEQ ID NO: 3391 - RNA, 19 nt, Artificial Sequence
  Synthetic
gcagagggaggaagcgggg

SEQ ID NO: 3392 - RNA, 19 nt, Artificial Sequence
  Synthetic
cgcagagggaggaagcggg

SEQ ID NO: 3393 - RNA, 19 nt, Artificial Sequence
  Synthetic
ccgcagagggaggaagcgg

SEQ ID NO: 3394 - RNA, 19 nt, Artificial Sequence
  Synthetic
cccgcagagggaggaagcg

SEQ ID NO: 3395 - RNA, 19 nt, Artificial Sequence
  Synthetic
ccccgcagagggaggaagc

SEQ ID NO: 3396 - RNA, 19 nt, Artificial Sequence
  Synthetic
uccccgcagagggaggaag

SEQ ID NO: 3397 - RNA, 19 nt, Artificial Sequence
  Synthetic
cuccccgcagagggaggaa

SEQ ID NO: 3398 - RNA, 19 nt, Artificial Sequence
  Synthetic
ccuccccgcagagggagga

SEQ ID NO: 3399 - RNA, 19 nt, Artificial Sequence
  Synthetic
uccuccccgcagagggagg

SEQ ID NO: 3400 - RNA, 19 nt, Artificial Sequence
  Synthetic
guccuccccgcagagggag

SEQ ID NO: 3401 - RNA, 19 nt, Artificial Sequence
  Synthetic
gguccuccccgcagaggga

SEQ ID NO: 3402 - RNA, 19 nt, Artificial Sequence
  Synthetic
ggguccuccccgcagaggg

SEQ ID NO: 3403 - RNA, 19 nt, Artificial Sequence
  Synthetic
cggguccuccccgcagagg

SEQ ID NO: 3404 - RNA, 19 nt, Artificial Sequence
  Synthetic
ccggguccuccccgcagag

SEQ ID NO: 3405 - RNA, 19 nt, Artificial Sequence
  Synthetic
cccggguccuccccgcaga

SEQ ID NO: 3406 - RNA, 19 nt, Artificial Sequence
  Synthetic
ucccggguccuccccgcag

SEQ ID NO: 3407 - RNA, 19 nt, Artificial Sequence
  Synthetic
gucccggguccuccccgca

SEQ ID NO: 3408 - RNA, 19 nt, Artificial Sequence
  Synthetic
ggucccggguccuccccgc

SEQ ID NO: 3409 - RNA, 19 nt, Artificial Sequence
  Synthetic
uggucccggguccuccccg

SEQ ID NO: 3410 - RNA, 19 nt, Artificial Sequence
  Synthetic
acagagggaggaagcgggg

SEQ ID NO: 3411 - RNA, 19 nt, Artificial Sequence
  Synthetic
cacagagggaggaagcggg

SEQ ID NO: 3412 - RNA, 19 nt, Artificial Sequence
  Synthetic
ccacagagggaggaagcgg

SEQ ID NO: 3413 - RNA, 19 nt, Artificial Sequence
  Synthetic
cccacagagggaggaagcg

SEQ ID NO: 3414 - RNA, 19 nt, Artificial Sequence
  Synthetic
ccccacagagggaggaagc

SEQ ID NO: 3415 - RNA, 19 nt, Artificial Sequence
  Synthetic
uccccacagagggaggaag

SEQ ID NO: 3416 - RNA, 19 nt, Artificial Sequence
  Synthetic
cuccccacagagggaggaa

SEQ ID NO: 3417 - RNA, 19 nt, Artificial Sequence
  Synthetic
ccuccccacagagggagga

SEQ ID NO: 3418 - RNA, 19 nt, Artificial Sequence
  Synthetic
uccuccccacagagggagg

SEQ ID NO: 3419 - RNA, 19 nt, Artificial Sequence
  Synthetic
guccuccccacagagggag

SEQ ID NO: 3420 - RNA, 19 nt, Artificial Sequence
  Synthetic
gguccuccccacagaggga

SEQ ID NO: 3421 - RNA, 19 nt, Artificial Sequence
  Synthetic
ggguccuccccacagaggg

SEQ ID NO: 3422 - RNA, 19 nt, Artificial Sequence
  Synthetic
cggguccuccccacagagg

SEQ ID NO: 3423 - RNA, 19 nt, Artificial Sequence
  Synthetic
ccggguccuccccacagag

SEQ ID NO: 3424 - RNA, 19 nt, Artificial Sequence
  Synthetic
cccggguccuccccacaga

SEQ ID NO: 3425 - RNA, 19 nt, Artificial Sequence
  Synthetic
ucccggguccuccccacag

SEQ ID NO: 3426 - RNA, 19 nt, Artificial Sequence
  Synthetic
gucccggguccuccccaca

SEQ ID NO: 3427 - RNA, 19 nt, Artificial Sequence
  Synthetic
ggucccggguccuccccac

SEQ ID NO: 3428 - RNA, 19 nt, Artificial Sequence
  Synthetic
uggucccggguccucccca

SEQ ID NO: 3429 - RNA, 19 nt, Artificial Sequence
  Synthetic
ugaccacggugcaaagcag

SEQ ID NO: 3430 - RNA, 19 nt, Artificial Sequence
  Synthetic
cugaccacggugcaaagca

SEQ ID NO: 3431 - RNA, 19 nt, Artificial Sequence
  Synthetic
ucugaccacggugcaaagc

SEQ ID NO: 3432 - RNA, 19 nt, Artificial Sequence
  Synthetic
cucugaccacggugcaaag

SEQ ID NO: 3433 - RNA, 19 nt, Artificial Sequence
  Synthetic
ccucugaccacggugcaaa

SEQ ID NO: 3434 - RNA, 19 nt, Artificial Sequence
  Synthetic
cccucugaccacggugcaa

SEQ ID NO: 3435 - RNA, 19 nt, Artificial Sequence
  Synthetic
ucccucugaccacggugca

SEQ ID NO: 3436 - RNA, 19 nt, Artificial Sequence
  Synthetic
gucccucugaccacggugc

SEQ ID NO: 3437 - RNA, 19 nt, Artificial Sequence
  Synthetic
agucccucugaccacggug

SEQ ID NO: 3438 - RNA, 19 nt, Artificial Sequence
  Synthetic
cagucccucugaccacggu

SEQ ID NO: 3439 - RNA, 19 nt, Artificial Sequence
  Synthetic
acagucccucugaccacgg

SEQ ID NO: 3440 - RNA, 19 nt, Artificial Sequence
  Synthetic
gacagucccucugaccacg

SEQ ID NO: 3441 - RNA, 19 nt, Artificial Sequence
  Synthetic
ugacagucccucugaccac

SEQ ID NO: 3442 - RNA, 19 nt, Artificial Sequence
  Synthetic
cugacagucccucugacca

SEQ ID NO: 3443 - RNA, 19 nt, Artificial Sequence
  Synthetic
gcugacagucccucugacc

SEQ ID NO: 3444 - RNA, 19 nt, Artificial Sequence
  Synthetic
agcugacagucccucugac

SEQ ID NO: 3445 - RNA, 19 nt, Artificial Sequence
  Synthetic
cagcugacagucccucuga

SEQ ID NO: 3446 - RNA, 19 nt, Artificial Sequence
  Synthetic
ucagcugacagucccucug

SEQ ID NO: 3447 - RNA, 19 nt, Artificial Sequence
  Synthetic
cucagcugacagucccucu

SEQ ID NO: 3448 - RNA, 19 nt, Artificial Sequence
  Synthetic
cgaccacggugcaaagcag

SEQ ID NO: 3449 - RNA, 19 nt, Artificial Sequence
  Synthetic
ccgaccacggugcaaagca

SEQ ID NO: 3450 - RNA, 19 nt, Artificial Sequence
  Synthetic
uccgaccacggugcaaagc

SEQ ID NO: 3451 - RNA, 19 nt, Artificial Sequence
  Synthetic
cuccgaccacggugcaaag

SEQ ID NO: 3452 - RNA, 19 nt, Artificial Sequence
  Synthetic
ccuccgaccacggugcaaa

SEQ ID NO: 3453 - RNA, 19 nt, Artificial Sequence
  Synthetic
cccuccgaccacggugcaa

SEQ ID NO: 3454 - RNA, 19 nt, Artificial Sequence
  Synthetic
ucccuccgaccacggugca

SEQ ID NO: 3455 - RNA, 19 nt, Artificial Sequence
  Synthetic
gucccuccgaccacggugc

SEQ ID NO: 3456 - RNA, 19 nt, Artificial Sequence
  Synthetic
agucccuccgaccacggug

SEQ ID NO: 3457 - RNA, 19 nt, Artificial Sequence
  Synthetic
cagucccuccgaccacggu

SEQ ID NO: 3458 - RNA, 19 nt, Artificial Sequence
  Synthetic
acagucccuccgaccacgg

SEQ ID NO: 3459 - RNA, 19 nt, Artificial Sequence
  Synthetic
gacagucccuccgaccacg

SEQ ID NO: 3460 - RNA, 19 nt, Artificial Sequence
  Synthetic
ugacagucccuccgaccac

SEQ ID NO: 3461 - RNA, 19 nt, Artificial Sequence
  Synthetic
cugacagucccuccgacca

SEQ ID NO: 3462 - RNA, 19 nt, Artificial Sequence
  Synthetic
gcugacagucccuccgacc

SEQ ID NO: 3463 - RNA, 19 nt, Artificial Sequence
  Synthetic
agcugacagucccuccgac

SEQ ID NO: 3464 - RNA, 19 nt, Artificial Sequence
  Synthetic
cagcugacagucccuccga

SEQ ID NO: 3465 - RNA, 19 nt, Artificial Sequence
  Synthetic
ucagcugacagucccuccg

SEQ ID NO: 3466 - RNA, 19 nt, Artificial Sequence
  Synthetic
cucagcugacagucccucc

SEQ ID NO: 3467 - RNA, 19 nt, Artificial Sequence
  Synthetic
caggucuggguggggcucc

SEQ ID NO: 3468 - RNA, 19 nt, Artificial Sequence
  Synthetic
ucaggucuggguggggcuc

SEQ ID NO: 3469 - RNA, 19 nt, Artificial Sequence
  Synthetic
uucaggucuggguggggcu

SEQ ID NO: 3470 - RNA, 19 nt, Artificial Sequence
  Synthetic
auucaggucuggguggggc

SEQ ID NO: 3471 - RNA, 19 nt, Artificial Sequence
  Synthetic
cauucaggucugggugggg

SEQ ID NO: 3472 - RNA, 19 nt, Artificial Sequence
  Synthetic
gcauucaggucuggguggg

SEQ ID NO: 3473 - RNA, 19 nt, Artificial Sequence
  Synthetic
agcauucaggucugggugg

SEQ ID NO: 3474 - RNA, 19 nt, Artificial Sequence
  Synthetic
aagcauucaggucugggug

SEQ ID NO: 3475 - RNA, 19 nt, Artificial Sequence
  Synthetic
gaagcauucaggucugggu

SEQ ID NO: 3476 - RNA, 19 nt, Artificial Sequence
  Synthetic
agaagcauucaggucuggg

SEQ ID NO: 3477 - RNA, 19 nt, Artificial Sequence
  Synthetic
cagaagcauucaggucugg

SEQ ID NO: 3478 - RNA, 19 nt, Artificial Sequence
  Synthetic
ucagaagcauucaggucug

SEQ ID NO: 3479 - RNA, 19 nt, Artificial Sequence
  Synthetic
cucagaagcauucaggucu

SEQ ID NO: 3480 - RNA, 19 nt, Artificial Sequence
  Synthetic
ucucagaagcauucagguc

SEQ ID NO: 3481 - RNA, 19 nt, Artificial Sequence
  Synthetic
cucucagaagcauucaggu

SEQ ID NO: 3482 - RNA, 19 nt, Artificial Sequence
  Synthetic
gcucucagaagcauucagg

SEQ ID NO: 3483 - RNA, 19 nt, Artificial Sequence
  Synthetic
ugcucucagaagcauucag

SEQ ID NO: 3484 - RNA, 19 nt, Artificial Sequence
  Synthetic
uugcucucagaagcauuca

SEQ ID NO: 3485 - RNA, 19 nt, Artificial Sequence
  Synthetic
uuugcucucagaagcauuc

SEQ ID NO: 3486 - RNA, 19 nt, Artificial Sequence
  Synthetic
uaggucuggguggggcucc

SEQ ID NO: 3487 - RNA, 19 nt, Artificial Sequence
  Synthetic
uuaggucuggguggggcuc

SEQ ID NO: 3488 - RNA, 19 nt, Artificial Sequence
  Synthetic
uuuaggucuggguggggcu

SEQ ID NO: 3489 - RNA, 19 nt, Artificial Sequence
  Synthetic
auuuaggucuggguggggc

SEQ ID NO: 3490 - RNA, 19 nt, Artificial Sequence
  Synthetic
cauuuaggucugggugggg

SEQ ID NO: 3491 - RNA, 19 nt, Artificial Sequence
  Synthetic
gcauuuaggucuggguggg

SEQ ID NO: 3492 - RNA, 19 nt, Artificial Sequence
  Synthetic
agcauuuaggucugggugg

SEQ ID NO: 3493 - RNA, 19 nt, Artificial Sequence
  Synthetic
aagcauuuaggucugggug

SEQ ID NO: 3494 - RNA, 19 nt, Artificial Sequence
  Synthetic
gaagcauuuaggucugggu

SEQ ID NO: 3495 - RNA, 19 nt, Artificial Sequence
  Synthetic
agaagcauuuaggucuggg

SEQ ID NO: 3496 - RNA, 19 nt, Artificial Sequence
  Synthetic
cagaagcauuuaggucugg

SEQ ID NO: 3497 - RNA, 19 nt, Artificial Sequence
  Synthetic
ucagaagcauuuaggucug

SEQ ID NO: 3498 - RNA, 19 nt, Artificial Sequence
  Synthetic
cucagaagcauuuaggucu

SEQ ID NO: 3499 - RNA, 19 nt, Artificial Sequence
  Synthetic
ucucagaagcauuuagguc

SEQ ID NO: 3500 - RNA, 19 nt, Artificial Sequence
  Synthetic
cucucagaagcauuuaggu

SEQ ID NO: 3501 - RNA, 19 nt, Artificial Sequence
  Synthetic
gcucucagaagcauuuagg

SEQ ID NO: 3502 - RNA, 19 nt, Artificial Sequence
  Synthetic
ugcucucagaagcauuuag

SEQ ID NO: 3503 - RNA, 19 nt, Artificial Sequence
  Synthetic
uugcucucagaagcauuua

SEQ ID NO: 3504 - RNA, 19 nt, Artificial Sequence
  Synthetic
uuugcucucagaagcauuu

SEQ ID NO: 3505 - RNA, 23 nt, Artificial Sequence
  Synthetic
caaagaaagaacuuucagcuacc

SEQ ID NO: 3506 - RNA, 23 nt, Artificial Sequence
  Synthetic
ccauggcgacccuggaaaagcug

SEQ ID NO: 3507 - RNA, 23 nt, Artificial Sequence
  Synthetic
aaagaacuuucagcuaccaagaa

SEQ ID NO: 3508 - RNA, 23 nt, Artificial Sequence
  Synthetic
aaauucuccagaauuucagaaac

SEQ ID NO: 3509 - RNA, 23 nt, Artificial Sequence
  Synthetic
aaugccucaacaaaguuaucaaa

SEQ ID NO: 3510 - RNA, 21 nt, Artificial Sequence
  Synthetic
gaggaagaggaggaggccgac

SEQ ID NO: 3511 - RNA, 21 nt, Artificial Sequence
  Synthetic
aagaggaggaggccgacgccc

SEQ ID NO: 3512 - DNA, 21 bp, Artificial Sequence
  Synthetic
  misc_feature (1)..(19): RNA
aagaaagaacuuucagcuatt

SEQ ID NO: 3513 - DNA, 21 bp, Artificial Sequence
  Synthetic
  misc_feature (1)..(19): RNA
uagcugaaaguucuuucuutt

SEQ ID NO: 3514 - DNA, 21 bp, Artificial Sequence
  Synthetic
  misc_feature (10)..(14): 2'-deoxy-2'-fluoro derivatives
  misc_feature (17)..(18): 2'-deoxy-2'-fluoro derivatives
  misc_feature (1)..(19): RNA
  misc_feature (21)..(21): 3'-3 attachment to inverted deoxyabasic moiety.
  misc_feature (1)..(1): 5'-3 attachment to inverted deoxyabasic moiety.
aagaaagaacuuucagcuatt

SEQ ID NO: 3515 - DNA, 21 bp, Artificial Sequence
  Synthetic
  misc_feature (1)..(1): 2'-deoxy-2'-fluoro derivative
  misc_feature (4)..(5): 2'-deoxy-2'-fluoro derivatives
  misc_feature (11)..(19): 2'-deoxy-2'-fluoro derivatives
  misc_feature (1)..(19): RNA
  misc_feature (20)..(21): phosphorothioate internucleotide linkage
uagcugaaaguucuuucuutt

SEQ ID NO: 3516 - DNA, 21 bp, Artificial Sequence
  Synthetic
  misc_feature (1)..(9): deoxy derivatives
  misc_feature (15)..(16): deoxy derivatives
  misc_feature (9)..(14): 2'-deoxy-2'-fluoro derivatives
  misc_feature (17)..(18): 2'-deoxy-2'-fluoro derivatives
  misc_feature (1)..(19): RNA
  misc_feature (21)..(21): 3'-3 attachment to inverted deoxyabasic moiety
  misc_feature (1)..(1): 5'-3 attachment to inverted deoxyabasic moiety
aagaaagaacuuucagcuatt

SEQ ID NO: 3517 - DNA, 21 bp, Artificial Sequence
  Synthetic
  misc_feature (1)..(1): 2'-deoxy-2'-fluoro derivative
  misc_feature (4)..(5): 2'-deoxy-2'-fluoro derivatives
  misc_feature (11)..(19): 2'-deoxy-2'-fluoro derivatives
  misc_feature (2)..(3): 2'-O-methyl derivatives
  misc_feature (6)..(10): 2'-O-methyl derivatives
  misc_feature (1)..(19): RNA
  misc_feature (20)..(21): internucleotide phosphorothioate linkage
uagcugaaaguucuuucuutt

SEQ ID NO: 3518 - DNA, 21 bp, Artificial Sequence
  Synthetic
  misc_feature (1)..(19): RNA
aucgacuuucaagaaagaatt

SEQ ID NO: 3519 - DNA, 21 bp, Artificial Sequence
  Synthetic
  misc_feature (1)..(19): RNA
uucuuucuugaaagucgautt

SEQ ID NO: 3520 - DNA, 21 bp, Artificial Sequence
  Synthetic
  misc_feature (2)..(3): 2'-deoxy-2'-fluoro derivatives
  misc_feature (6)..(10): 2'-deoxy-2'-fluoro derivatives
  misc_feature (1)..(19): RNA
  misc_feature (21)..(21): 3'-3 attachment to inverted deoxyabasic moiety.
  misc_feature (1)..(1): 5'-3 attachment to inverted deoxyabasic moiety.
aucgacuuucaagaaagaatt

SEQ ID NO: 3521 - DNA, 21 bp, Artificial Sequence
  Synthetic
  misc_feature (1)..(9): 2'-deoxy-2'-fluoro derivatives
  misc_feature (15)..(16): 2'-deoxy-2'-fluoro derivatives
  misc_feature (19)..(19): 2'-deoxy-2'-fluoro derivative
  misc_feature (1)..(19): RNA
  misc_feature (20)..(21): internucleotide phosphorothioate linkage
uucuuucuugaaagucgautt

SEQ ID NO: 3522 - DNA, 21 bp, Artificial Sequence
  Synthetic
  misc_feature (1)..(1): deoxy derivative
  misc_feature (4)..(5): deoxy derivatives
  misc_feature (11)..(19): deoxy derivatives
  misc_feature (2)..(3): 2'-deoxy-2'-fluoro derivatives
  misc_feature (6)..(10): 2'-deoxy-2'-fluoro derivatives
  misc_feature (1)..(19): RNA
  misc_feature (21)..(21): 3'-3 attachment to inverted deoxyabasic moiety
  misc_feature (1)..(1): 5'-3 attachment to inverted deoxyabasic moiety
aucgacuuucaagaaagaatt

SEQ ID NO: 3523 - DNA, 21 bp, Artificial Sequence
  Synthetic
  misc_feature (1)..(9): 2'-deoxy-2'-fluoro derivatives
  misc_feature (15)..(16): 2'-deoxy-2'-fluoro derivatives
  misc_feature (1)..(19): RNA
  misc_feature (20)..(21): internucleotide phosphorothioate linkage
  misc_feature (19)..(19): 2'-deoxy-2'-fluoro derivative
  misc_feature (10)..(14): 2'-O-methyl derivatives
uucuuucuugaaagucgautt

SEQ ID NO: 3524 - DNA, 21 bp, Artificial Sequence
  Synthetic
  misc_feature (2)..(2): 2'-deoxy-2'-fluoro derivative
  misc_feature (5)..(5): 2'-deoxy-2'-fluoro derivative
  misc_feature (8)..(11): 2'-deoxy-2'-fluoro derivatives
  misc_feature (19)..(19): 2'-deoxy-2'-fluoro derivative
  misc_feature (1)..(19): RNA
  misc_feature (21)..(21): 3'-3 attachment to inverted deoxyabasic moiety
  misc_feature (1)..(1): 5'-3 attachment to inverted deoxyabasic moiety
auggcgacccuggaaaagctt

SEQ ID NO: 3525 - DNA, 21 bp, Artificial Sequence
  Synthetic
  misc_feature (1)..(1): 5'-3 attachment to inverted deoxyabasic moiety
  misc_feature (21)..(21): 3'-3 attachment to inverted deoxyabasic moiety
  misc_feature (1)..(19): RNA
  misc_feature (4)..(9): 2'-deoxy-2'-fluoro derivatives
  misc_feature (12)..(13): 2'-deoxy-2'-fluoro derivatives
  misc_feature (15)..(16): 2'-deoxy-2'-fluoro derivatives
agaacuuucagcuaccaagtt

SEQ ID NO: 3526 - DNA, 21 bp, Artificial Sequence
  Synthetic
  misc_feature (1)..(1): 5'-3 attachment to inverted deoxyabasic moiety
  misc_feature (21)..(21): 3'-3 attachment to inverted deoxyabasic moiety
  misc_feature (1)..(19): RNA
  misc_feature (2)..(7): 2'-deoxy-2'-fluoro derivatives
  misc_feature (12)..(15): 2'-deoxy-2'-fluoro derivatives
auucuccagaauuucagaatt

SEQ ID NO: 3527 - DNA, 21 bp, Artificial Sequence
  Synthetic
  misc_feature (1)..(1): 5'-3 attachment to inverted deoxyabasic moiety
  misc_feature (21)..(21): 3'-3 attachment to inverted deoxyabasic moiety
  misc_feature (1)..(19): RNA
  misc_feature (1)..(1): 2'-deoxy-2'-fluoro derivative
  misc_feature (3)..(6): 2'-deoxy-2'-fluoro derivatives
  misc_feature (9)..(9): 2'-deoxy-2'-fluoro derivative
  misc_feature (14)..(15): 2'-deoxy-2'-fluoro derivatives
  misc_feature (17)..(18): 2'-deoxy-2'-fluoro derivatives
ugccucaacaaaguuaucatt

SEQ ID NO: 3528 - DNA, 21 bp, Artificial Sequence
  Synthetic
  misc_feature (1)..(1): 5'-3 attachment to inverted deoxyabasic moiety
  misc_feature (21)..(21): 3'-3 attachment to inverted deoxyabasic moiety
  misc_feature (1)..(19): RNA
  misc_feature (15)..(16): 2'-deoxy-2'-fluoro derivatives
  misc_feature (19)..(19): 2'-deoxy-2'-fluoro derivative
ggaagaggaggaggccgactt

SEQ ID NO: 3529 - DNA, 21 bp, Artificial Sequence
  Synthetic
  misc_feature (1)..(1): 5'-3 attachment to inverted deoxyabasic moiety
  misc_feature (21)..(21): 3'-3 attachment to inverted deoxyabasic moiety
  misc_feature (1)..(19): RNA
  misc_feature (11)..(12): 2'-deoxy-2'-fluoro derivatives
  misc_feature (15)..(15): 2'-deoxy-2'-fluoro derivative
  misc_feature (17)..(19): 2'-deoxy-2'-fluoro derivatives
gaggaggaggccgacgccctt

SEQ ID NO: 3530 - DNA, 21 bp, Artificial Sequence
  Synthetic
  misc_feature (2)..(8): 2'-deoxy-2'-fluoro derivatives
  misc_feature (13)..(14): 2'-deoxy-2'-fluoro derivatives
  misc_feature (16)..(17): 2'-deoxy-2'-fluoro derivatives
  misc_feature (19)..(19): 2'-deoxy-2'-fluoro derivative
  misc_feature (1)..(19): RNA
  misc_feature (20)..(21): internucleotide phosphorothioate linkage
gcuuuuccagggucgccautt

SEQ ID NO: 3531 - DNA, 21 bp, Artificial Sequence
  Synthetic
  misc_feature (1)..(3): 2'-deoxy-2'-fluoro derivatives
  misc_feature (6)..(6): 2'-deoxy-2'-fluoro derivative
  misc_feature (9)..(10): 2'-deoxy-2'-fluoro derivatives
  misc_feature (16)..(19): 2'-deoxy-2'-fluoro derivatives
  misc_feature (1)..(19): RNA
  misc_feature (20)..(21): internucleotide phosphorothioate linkage
cuugguagcugaaaguucutt

SEQ ID NO: 3532 - DNA, 21 bp, Artificial Sequence
  Synthetic
  misc_feature (1)..(4): 2'-deoxy-2'-fluoro derivatives
  misc_feature (9)..(12): 2'-deoxy-2'-fluoro derivatives
  misc_feature (19)..(19): 2'-deoxy-2'-fluoro derivative
  misc_feature (1)..(19): RNA
  misc_feature (20)..(21): internucleotide phosphorothioate linkage
uucugaaauucuggagaautt

SEQ ID NO: 3533 - DNA, 21 bp, Artificial Sequence
  Synthetic
  misc_feature (1)..(1): 2'-deoxy-2'-fluoro derivative
  misc_feature (4)..(4): 2'-deoxy-2'-fluoro derivative
  misc_feature (7)..(10): 2'-deoxy-2'-fluoro derivatives
  misc_feature (12)..(13): 2'-deoxy-2'-fluoro derivatives
  misc_feature (18)..(18): 2'-deoxy-2'-fluoro derivative
  misc_feature (1)..(19): RNA
  misc_feature (20)..(21): internucleotide phosphorothioate linkage
ugauaacuuuguugaggcatt

SEQ ID NO: 3534 - DNA, 21 bp, Artificial Sequence
  Synthetic
  misc_feature (2)..(3): 2'-deoxy-2'-fluoro derivatives
  misc_feature (6)..(19): 2'-deoxy-2'-fluoro derivatives
  misc_feature (1)..(19): RNA
  misc_feature (20)..(21): internucleotide phosphorothioate linkage
gucggccuccuccucuucctt

SEQ ID NO: 3535 - DNA, 21 bp, Artificial Sequence
  Synthetic
  misc_feature (4)..(4): 2'-deoxy-2'-fluoro derivative
  misc_feature (6)..(7): 2'-deoxy-2'-fluoro derivatives
  misc_feature (10)..(19): 2'-deoxy-2'-fluoro derivatives
  misc_feature (1)..(19): RNA
  misc_feature (20)..(21): internucleotide phosphorothioate linkage
gggcgucggccuccuccuctt

SEQ ID NO: 3536 - DNA, 21 bp, Artificial Sequence
  Synthetic
  misc_feature (1)..(1): deoxy derivative
  misc_feature (3)..(4): deoxy derivatives
  misc_feature (6)..(7): deoxy derivatives
  misc_feature (12)..(18): deoxy derivatives
  misc_feature (2)..(2): 2'-deoxy-2'-fluoro derivative
  misc_feature (5)..(5): 2'-deoxy-2'-fluoro derivative
  misc_feature (8)..(11): 2'-deoxy-2'-fluoro derivatives
  misc_feature (19)..(19): 2'-deoxy-2'-fluoro derivative
  misc_feature (1)..(19): RNA
  misc_feature (21)..(21): 3'-3 attachment to inverted deoxyabasic moiety
  misc_feature (1)..(1): 5'-3 attachment to inverted deoxyabasic moiety
auggcgacccuggaaaagctt

SEQ ID NO: 3537 - DNA, 21 bp, Artificial Sequence
  Synthetic
  misc_feature (1)..(4): deoxy derivatives
  misc_feature (10)..(11): deoxy derivatives
  misc_feature (14)..(14): deoxy derivative
  misc_feature (17)..(19): deoxy derivatives
  misc_feature (5)..(9): 2'-deoxy-2'-fluoro derivatives
  misc_feature (12)..(13): 2'-deoxy-2'-fluoro derivatives
  misc_feature (15)..(16): 2'-deoxy-2'-fluoro derivatives
  misc_feature (1)..(19): RNA
  misc_feature (21)..(21): 3'-3 attachment to inverted deoxyabasic moiety
  misc_feature (1)..(1): 5'-3 attachment to inverted deoxyabasic moiety
agaacuuucagcuaccaagtt

SEQ ID NO: 3538 - DNA, 21 bp, Artificial Sequence
  Synthetic
  misc_feature (1)..(1): deoxy derivative
  misc_feature (8)..(11): deoxy derivatives
  misc_feature (16)..(19): deoxy derivatives
  misc_feature (2)..(7): 2'-deoxy-2'-fluoro derivatives
  misc_feature (12)..(15): 2'-deoxy-2'-fluoro derivatives
  misc_feature (1)..(19): RNA
  misc_feature (21)..(21): 3'-3 attachment to inverted deoxyabasic moiety
  misc_feature (1)..(1): 5'-3 attachment to inverted deoxyabasic moiety
auucuccagaauuucagaatt

SEQ ID NO: 3539 - DNA, 21 bp, Artificial Sequence
  Synthetic
  misc_feature (1)..(1): 2'-deoxy-2'-fluoro derivative
  misc_feature (3)..(6): 2'-deoxy-2'-fluoro derivatives
  misc_feature (9)..(9): 2'-deoxy-2'-fluoro derivative
  misc_feature (14)..(15): 2'-deoxy-2'-fluoro derivatives
  misc_feature (17)..(18): 2'-deoxy-2'-fluoro derivatives
  misc_feature (2)..(2): deoxy derivative
  misc_feature (7)..(8): deoxy derivatives
  misc_feature (10)..(13): deoxy derivatives
  misc_feature (16)..(16): deoxy derivative
  misc_feature (19)..(19): deoxy derivative
  misc_feature (1)..(19): RNA
  misc_feature (21)..(21): 3'-3 attachment to inverted deoxyabasic moiety
  misc_feature (1)..(1): 5'-3 attachment to inverted deoxyabasic moiety
ugccucaacaaaguuaucatt

SEQ ID NO: 3540 - DNA, 21 bp, Artificial Sequence
  Synthetic
  misc_feature (1)..(14): deoxy derivatives
  misc_feature (17)..(18): deoxy derivatives
  misc_feature (15)..(16): 2'-deoxy-2'-fluoro derivatives
  misc_feature (19)..(19): 2'-deoxy-2'-fluoro derivative
  misc_feature (1)..(19): RNA
  misc_feature (21)..(21): 3'-3 attachment to inverted deoxyabasic moiety
  misc_feature (1)..(1): 5'-3 attachment to inverted deoxyabasic moiety
ggaagaggaggaggccgactt

SEQ ID NO: 3541 - DNA, 21 bp, Artificial Sequence
  Synthetic
  misc_feature (1)..(10): deoxy derivatives
  misc_feature (13)..(14): deoxy derivatives
  misc_feature (16)..(16): deoxy derivatives
  misc_feature (11)..(12): 2'-deoxy-2'-fluoro derivatives
  misc_feature (15)..(15): 2'-deoxy-2'-fluoro derivative
  misc_feature (17)..(19): 2'-deoxy-2'-fluoro derivatives
  misc_feature (1)..(19): RNA
  misc_feature (21)..(21): 3'-3 attachment to inverted deoxyabasic moiety
  misc_feature (1)..(1): 5'-3 attachment to inverted deoxyabasic moiety
gaggaggaggccgacgccctt

SEQ ID NO: 3542 - DNA, 21 bp, Artificial Sequence
  Synthetic
  misc_feature (1)..(1): 2'-O-methyl derivative
  misc_feature (9)..(12): 2'-O-methyl derivatives
  misc_feature (15)..(15): 2'-O-methyl derivative
  misc_feature (18)..(18): 2'-O-methyl derivative
  misc_feature (2)..(8): 2'-deoxy-2'-fluoro derivatives
  misc_feature (13)..(14): 2'-deoxy-2'-fluoro derivatives
  misc_feature (16)..(17): 2'-deoxy-2'-fluoro derivatives
  misc_feature (19)..(19): 2'-deoxy-2'-fluoro derivative
  misc_feature (1)..(19): RNA
  misc_feature (20)..(21): internucleotide phosphorothioate linkage
gcuuuuccagggucgccautt

SEQ ID NO: 3543 - DNA, 21 bp, Artificial Sequence
  Synthetic
  misc_feature (1)..(3): 2'-deoxy-2'-fluoro derivatives
  misc_feature (6)..(6): 2'-deoxy-2'-fluoro derivative
  misc_feature (9)..(10): 2'-deoxy-2'-fluoro derivatives
  misc_feature (16)..(19): 2'-deoxy-2'-fluoro derivatives
  misc_feature (4)..(5): 2'-O-methyl derivatives
  misc_feature (7)..(8): 2'-O-methyl derivatives
  misc_feature (11)..(15): 2'-O-methyl derivatives
  misc_feature (1)..(19): RNA
  misc_feature (20)..(21): internucleotide phophorothioate linkage
cuugguagcugaaaguucutt

SEQ ID NO: 3544 - DNA, 21 bp, Artificial Sequence
  Synthetic
  misc_feature (1)..(4): 2'-deoxy-2'-fluoro derivatives
  misc_feature (9)..(12): 2'-deoxy-2'-fluoro derivatives
  misc_feature (19)..(19): 2'-deoxy-2'-fluoro derivative
  misc_feature (5)..(8): 2'-O-methyl derivatives
  misc_feature (13)..(18): 2'-O-methyl derivatives
  misc_feature (1)..(19): RNA
  misc_feature (20)..(21): internucleotide phosphorothioate linkage
uucugaaauucuggagaautt

SEQ ID NO: 3545 - DNA, 21 bp, Artificial Sequence
  Synthetic
  misc_feature (1)..(1): 2'-deoxy-2'-fluoro derivative
  misc_feature (4)..(4): 2'-deoxy-2'-fluoro derivative
  misc_feature (7)..(10): 2'-deoxy-2'-fluoro derivatives
  misc_feature (12)..(13): 2'-deoxy-2'-fluoro derivatives
  misc_feature (18)..(18): 2'-deoxy-2'-fluoro derivative
  misc_feature (2)..(3): 2'-O-methyl derivatives
  misc_feature (5)..(6): 2'-O-methyl derivatives
  misc_feature (11)..(11): 2'-O-methyl derivative
  misc_feature (14)..(17): 2'-O-methyl derivatives
  misc_feature (19)..(19): 2'-O-methyl derivative
  misc_feature (1)..(19): RNA
  misc_feature (20)..(21): internucleotide phosphorothioate linkage
ugauaacuuuguugaggcatt

SEQ ID NO: 3546 - DNA, 21 bp, Artificial Sequence
  Synthetic
  misc_feature (1)..(1): 2'-O-methyl derivative
  misc_feature (4)..(5): 2'-O-methyl derivatives
  misc_feature (2)..(3): 2'-deoxy-2'-fluoro derivatives
  misc_feature (6)..(19): 2'-deoxy-2'-fluoro derivatives
  misc_feature (1)..(19): RNA
  misc_feature (20)..(21): internucleotide phosphorothioate linkage
gucggccuccuccucuucctt

SEQ ID NO: 3547 - DNA, 21 bp, Artificial Sequence
  Synthetic
  misc_feature (1)..(3): 2'-O-methyl derivatives
  misc_feature (5)..(5): 2'-O-methyl derivative
  misc_feature (8)..(9): 2'-O-methyl derivatives
  misc_feature (4)..(4): 2'-deoxy-2'-fluoro derivative
  misc_feature (6)..(7): 2'-deoxy-2'-fluoro derivatives
  misc_feature (10)..(19): 2'-deoxy-2'-fluoro derivatives
  misc_feature (1)..(19): RNA
  misc_feature (20)..(21): internucleotide phosphorothioate linkage
gggcgucggccuccuccuctt

SEQ ID NO: 3548 - DNA, 21 bp, Artificial Sequence
  Synthetic
  misc_feature (1)..(19): RNA
  misc_feature (21)..(21): 3'-3 attachment to inverted deoxyabasic moiety
  misc_feature (1)..(1): 5'-3 attachment to inverted deoxyabasic moiety
auggcgacccuggaaaagctt

SEQ ID NO: 3549 - DNA, 21 bp, Artificial Sequence
  Synthetic
  misc_feature (1)..(19): RNA
  misc_feature (21)..(21): 3'-3 attachment to inverted deoxyabasic moiety
  misc_feature (1)..(1): 5'-3 attachment to inverted deoxyabasic moiety
agaacuuucagcuaccaagtt

SEQ ID NO: 3550 - DNA, 21 bp, Artificial Sequence
  Synthetic
  misc_feature (1)..(19): RNA
  misc_feature (21)..(21): 3'-3 attachment to inverted deoxyabasic moiety
  misc_feature (1)..(1): 5'-3 attachment to inverted deoxyabasic moiety
auucuccagaauuucagaatt

SEQ ID NO: 3551 - DNA, 21 bp, Artificial Sequence
  Synthetic
  misc_feature (1)..(19): RNA
  misc_feature (21)..(21): 3'-3 attachment to inverted deoxyabasic moiety
  misc_feature (1)..(1): 5'-3 attachment to inverted deoxyabasic moiety
ugccucaacaaaguuaucatt

SEQ ID NO: 3552 - DNA, 21 bp, Artificial Sequence
  Synthetic
  misc_feature (1)..(19): RNA
  misc_feature (21)..(21): 3'-3 attachment to inverted deoxyabasic moiety
  misc_feature (1)..(1): 5'-3 attachment to inverted deoxyabasic moiety
ggaagaggaggaggccgactt

SEQ ID NO: 3553 - DNA, 21 bp, Artificial Sequence
  Synthetic
  misc_feature (1)..(19): RNA
  misc_feature (21)..(21): 3'-3 attachment to inverted deoxyabasic moiety
  misc_feature (1)..(1): 5'-3 attachment to inverted deoxyabasic moiety
gaggaggaggccgacgccctt

SEQ ID NO: 3554 - DNA, 21 bp, Artificial Sequence
  Synthetic
  misc_feature (1)..(19): RNA
  misc_feature (20)..(21): internucleotide phosphorothioate linkage
gcuuuuccagggucgccautt

SEQ ID NO: 3555 - DNA, 21 bp, Artificial Sequence
  Synthetic
  misc_feature (1)..(19): RNA
  misc_feature (20)..(21): internucleotide phosphorothioate linkage
cuugguagcugaaaguucutt

SEQ ID NO: 3556 - DNA, 21 bp, Artificial Sequence
  Synthetic
  misc_feature (1)..(19): RNA
  misc_feature (20)..(21): internucleotide phosphorothioate linkage
uucugaaauucuggagaautt

SEQ ID NO: 3557 - DNA, 21 bp, Artificial Sequence
  Synthetic
  misc_feature (1)..(19): RNA
  misc_feature (20)..(21): internucleotide phosphorothioate linkage
ugauaacuuuguugaggcatt

SEQ ID NO: 3558 - DNA, 21 bp, Artificial Sequence
  Synthetic
  misc_feature (1)..(19): RNA
  misc_feature (20)..(21): internucleotide phosphorothioate linkage
gucggccuccuccucuucctt

SEQ ID NO: 3559 - DNA, 21 bp, Artificial Sequence
  Synthetic
  misc_feature (1)..(19): RNA
  misc_feature (20)..(21): internucleotide phosphorothioate linkage
gggcgucggccuccuccuctt

SEQ ID NO: 3560 - DNA, 21 bp, Artificial Sequence
  Synthetic
  misc_feature (1)..(19): n stands for any ribonucleotide
  misc_feature (20)..(21): n stands for any nucleotide, such as deoxynucleotides or universal bases
  misc_feature (21)..(21): 3'-3 optional attachment to abasic, inverted abasic, inverted nucleotide or other terminal cap.
  misc_feature (1)..(1): 5'-3 optional attachment to abasic, inverted abasic, inverted nucleotide or other terminal cap.
nnnnnnnnnnnnnnnnnnnnn

SEQ ID NO: 3561 - DNA, 21 bp, Artificial Sequence
  Synthetic
  misc_feature (1)..(19): n stands for any ribonucleotide
  misc_feature (20)..(21): n stands for any nucleotide, such as deoxynucleotides or universal bases
  misc_feature (20)..(21): optional internucleotide phosphorothioate or phosphorodithioate linkage
  misc_feature (21)..(21): 3'-3 optional attachment to glyceryl, abasic, inverted abasic, inverted nucleotide or other terminal cap.
nnnnnnnnnnnnnnnnnnnnn

SEQ ID NO: 3562 - DNA, 21 bp, Artificial Sequence
  Description of Artificial Sequence: Target Sequence/siNA antisense region
  misc_feature (1)..(19): n stands for any nucleotide, wherein all pyrimidines are 2'-fluoro or OCF3 derivatives and all purines are 2'-O-methyl derivatives
  misc_feature (20)..(21): n stands for any nucleotide, such as deoxynucleotides or universal bases
  misc_feature (20)..(21): optional internucleotide phosphorothioate or phosphorodithioate linkage
nnnnnnnnnnnnnnnnnnnnn

SEQ ID NO: 3563 - DNA, 21 bp, Artificial Sequence
  Synthetic
  misc_feature (1)..(19): n stands for any nucleotide, wherein all pyrimidines are 2'-fluoro or OCF3 derivatives and all purines are 2'-O-methyl derivatives
  misc_feature (20)..(21): n stands for any nucleotide, such as deoxynucleotides or universal bases
  misc_feature (20)..(21): optional internucleotide phosphorothioate or phosphorodithioate linkage
  misc_feature (21)..(21): 3'-3 optional attachment to glyceryl, abasic, inverted abasic, inverted nucleotide or other terminal cap.
nnnnnnnnnnnnnnnnnnnnn

SEQ ID NO: 3564 - DNA, 21 bp, Artificial Sequence
  Synthetic
  misc_feature (1)..(19): n stands for any nucleotide, wherein all pyrimidines are 2'-fluoro or OCF3 derivatives
  misc_feature (20)..(21): n stands for any nucleotide such as deoxynucleotides or universal bases
  misc_feature (21)..(21): 3'-3 optional attachment to abasic, inverted abasic, inverted nucleotide or other terminal cap.
  misc_feature (1)..(1): 5'-3 optional attachment to abasic, inverted abasic, inverted nucleotide or other terminal cap.
nnnnnnnnnnnnnnnnnnnnn

SEQ ID NO: 3565 - DNA, 21 bp, Artificial Sequence
  Synthetic
  misc_feature (1)..(19): n stands for any nucleotide, wherein all pyrimidines are 2'-fluoro or OCF3 derivatives
  misc_feature (20)..(21): n stands for any nucleotide such as deoxynucleotides or universal bases
  misc_feature (20)..(21): optional internucleotide phosphorothioate or phosphorodithioate linkage
  misc_feature (21)..(21): 3'-3 optional attachment to glyceryl, abasic, inverted abasic, inverted nucleotide or other terminal cap.
nnnnnnnnnnnnnnnnnnnnn

SEQ ID NO: 3566 - DNA, 21 bp, Artificial Sequence
  Synthetic
  misc_feature (1)..(19): n stands for any nucleotide, wherein all pyrimidines are 2'-fluoro or OCF3 derivatives and all purines are 2'-deoxy derivatives
  misc_feature (20)..(21): n stands for any nucleotide such as deoxynucleotides or universal bases
  misc_feature (21)..(21): 3'-3 optional attachment to abasic, inverted abasic, inverted nucleotide or other terminal cap.
  misc_feature (1)..(1): 5'-5 optional attachment to abasic, inverted abasic, inverted nucleotide or other terminal cap.
nnnnnnnnnnnnnnnnnnnnn

SEQ ID NO: 3567 - DNA, 21 bp, Artificial Sequence
  Synthetic
  misc_feature (1)..(19): n stands for any nucleotide, wherein all pyrimidines are 2'-fluoro or OCF3 derivatives and all purines are 2'-deoxy derivatives
  misc_feature (20)..(21): n stands for any nucleotide such as deoxynucleotides or universal bases
  misc_feature (20)..(21): optional internucleotide phosphorothioate or phosphorodithioate linkage
  misc_feature (21)..(21): 3'-3 optional attachment to glyceryl, abasic, inverted abasic, inverted nucleotide or other terminal cap.
nnnnnnnnnnnnnnnnnnnnn

SEQ ID NO: 3568 - DNA, 21 bp, Artificial Sequence
  Synthetic
  misc_feature (1)..(19): RNA
  misc_feature (21)..(21): 3'-3 attached terminal deoxyabasic moeity, inverted abasic, inverted nucleotide or other terminal cap that is optionally present
  misc_feature (1)..(1): attached terminal deoxyabasic moeity, inverted abasic, inverted nucleotide or other terminal cap that is optionally present
aagaaagaacuuucagcuatt

SEQ ID NO: 3569 - DNA, 21 bp, Artificial Sequence
  Synthetic
  misc_feature (1)..(19): RNA
  misc_feature (20)..(21): optional internucleotide phosphorothioate or phosphorodithioate linkage
  misc_feature (21)..(21): 3'-3 optional attachment to glyceryl or inverted deoxyabasic moiety
uagcugaaaguucuuucuutt

SEQ ID NO: 3570 - DNA, 21 bp, Artificial Sequence
  Synthetic
  misc_feature (1)..(9): 2'-O-methyl derivatives
  misc_feature (15)..(16): 2'-O-methyl derivatives
  misc_feature (19)..(19): 2'-O-methyl derivatives
  misc_feature (20)..(21): optional internucleotide phosphorothioate or phosphorodithioate linkage
  misc_feature (10)..(14): 2'-deoxy-2'-fluoro derivatives
  misc_feature (17)..(18): 2'-deoxy-2'-fluoro derivatives
aagaaagaacuuucagcuatt

SEQ ID NO: 3571 - DNA, 21 bp, Artificial Sequence
  Synthetic
  misc_feature (1)..(2): 2'-deoxy-2'-fluoro or 2'-OCF3 derivatives
  misc_feature (4)..(5): 2'-deoxy-2'-fluoro or 2'-OCF3 derivatives
  misc_feature (11)..(19): 2'-deoxy-2'-fluoro or 2'-OCF3 derivatives
  misc_feature (3)..(3): 2'-O-methyl derivative
  misc_feature (6)..(10): 2'-O-methyl derivatives
  misc_feature (20)..(21): optional internucleotide phosphorothioate or phosphorodithioate linkage
  misc_feature (21)..(21): 3'-3 optional attachment to glyceryl or inverted deoxyabasic moiety
uagcugaaaguucuuucuutt

SEQ ID NO: 3572 - DNA, 21 bp, Artificial Sequence
  Synthetic
  misc_feature (10)..(14): 2'-deoxy or 2'-fluoro or 2'-OCF3 derivatives
  misc_feature (17)..(18): 2'-deoxy or 2'-fluoro or 2'-OCF3 derivatives
  misc_feature (21)..(21): 3'-3 attached terminal deoxyabasic moeity, inverted abasic, inverted nucleotide or other terminal cap that is optionally present
  misc_feature (1)..(1): 5'-3 attached terminal deoxyabasic moeity, inverted abasic, inverted nucleotide or other terminal cap that is optionally present
aagaaagaacuuucagcuatt

SEQ ID NO: 3573 - DNA, 21 bp, Artificial Sequence
  Synthetic
  misc_feature (1)..(1): 2'-deoxy-2'-fluoro or 2'-OCF3 derivative
  misc_feature (5)..(5): 2'-deoxy-2'-fluoro or 2'-OCF3 derivative
  misc_feature (11)..(19): 2'-deoxy-2'-fluoro or 2'-OCF3 derivatives
  misc_feature (20)..(21): optional internucleotide phosphorothioate or phosphorodithioate linkage
  misc_feature (21)..(21): 3'-3 optional attachment to glyceryl or inverted deoxyabasic moiety
uagcugaaaguucuuucuutt

SEQ ID NO: 3574 - DNA, 21 bp, Artificial Sequence
  Synthetic
  misc_feature (1)..(9): deoxy derivatives
  misc_feature (15)..(16): deoxy derivatives
  misc_feature (19)..(19): deoxy derivative
  misc_feature (10)..(14): 2'-deoxy-2'-fluoro or 2'-OCF3 derivatives
  misc_feature (17)..(18): 2'-deoxy-2'-fluoro or 2'-OCF3 derivatives
  misc_feature (21)..(21): 3'-3 attached terminal deoxyabasic moeity, inverted abasic, inverted nucleotide or other terminal cap that is optionally present
  misc_feature (1)..(1): 5'-3 attached terminal deoxyabasic moeity, inverted abasic, inverted nucleotide or other terminal cap that is optionally present
aagaaagaacuuucagcuatt

SEQ ID NO: 3575 - DNA, 21 bp, Artificial Sequence
  Synthetic
  misc_feature (1)..(1): 2'-deoxy-2'-fluoro or 2'-OCF3 derivative
  misc_feature (5)..(5): 2'-deoxy-2'-fluoro or 2'-OCF3 derivative
  misc_feature (11)..(19): 2'-deoxy-2'-fluoro or 2'-OCF3 derivatives
  misc_feature (2)..(4): 2'-deoxy derivatives
  misc_feature (6)..(10): 2'-deoxy derivatives
  misc_feature (20)..(21): optional internucleotide phosphorothioate or phosphorodithioate linkage
  misc_feature (21)..(21): 3'-3 optional attachment to glyceryl or inverted deoxyabasic moiety
uagcugaaaguucuuucuutt

SEQ ID NO: 3576 - RNA, 14 nt, Artificial Sequence
  Target Sequence/duplex forming oligonucleotide
auauaucuauuucg

SEQ ID NO: 3577 - RNA, 14 nt, Artificial Sequence
  Complementary Sequence/duplex forming oligonucleotide
cgaaauagauauau

SEQ ID NO: 3578 - RNA, 22 nt, Artificial Sequence
  Self Complementary duplex construct
cgaaauagauauaucuauuucg

SEQ ID NO: 3579 - DNA, 24 bp, Artificial Sequence
  Duplex forming oligonucleotide
  misc_feature (1)..(22): RNA
cgaaauagauauaucuauuucgnn
